(19) United States
(12) Patent Application Publication
(10) Pub. No.: US 2025/0170189 A1
(43) Pub. Date: May 29, 2025

(54) BACILLUS MEGATERIUM STRAIN, COMPOSITIONS THEREOF, AND METHODS OF USE

(71) Applicant: DEERLAND PROBIOTICS & ENZYMES, INC., Kennesaw, GA (US)

(72) Inventor: John DEATON, Kennesaw, GA (US)

(73) Assignee: DEERLAND PROBIOTICS & ENZYMES, INC., Kennesaw, GA (US)

(21) Appl. No.: 18/712,767

(22) PCT Filed: Dec. 8, 2022
(86) PCT No.: PCT/US2022/081191

§ 371 Date: May 23, 2024

(30) Foreign Application Priority Data
Dec. 8, 2021 (IE) 2021/0211

(51) Int. Cl. A61K 35/742

(52) U.S. Cl. CPC A61K 35/742

(57) ABSTRACT

The invention provides a Bacillus megaterium strain comprising a purified microbial population that comprises one or more bacteria with a gyrB that shares at least 97% identity with SEQ ID NO: 1; and/or that comprises one or more bacteria with a 16S rRNA that shares at least 97% identity with SEQ ID NO: 2. Optionally, the Bacillus megaterium strain shares at least 97% identity with SEQ ID NO: 3. The strain may be used in compositions and methods.

### FIELD OF THE INVENTION

[0001] This invention relates to a new Bacillus megaterium strain, which alone or in combination with other Bacilli strains can be used as probiotics or together with a prebiotic and a symbiotic. The invention also relates to a composition such as a pharmaceutical composition, dairy product, functional food, nutraceutical and product for personal care comprising the Bacillus megaterium strain alone or in combination, as well as use of the strain for prevention or treatment of gastrointestinal, urinary tract, vaginal, and other infections and diseases, and other uses.

### BACKGROUND OF THE INVENTION

[0002] Probiotics are live microorganisms or microbial mixtures administered to improve the patient's microbial balance, particularly the environment of the respiratory and gastrointestinal tract. Bacillus strains have been employed for the treatment of respiratory infections, prevention of diarrhoea, as well as, for the treatment of immuno-related diseases (Elshaghabee et al., 2017).

[0003] The normal intestinal flora is dominated by various bacterial species, which produce substances that help control the growth of pathogens. Dysbiosis is a condition that is characterized by a decrease of the certain bacterial species and an increased growth of pathogenic bacteria. Dysbiosis has been associated with the development of periodontal disease, inflammatory bowel disease, and chronic fatigue syndrome. Some studies have suggested patients with dysbiosis may have an increased risk of developing metabolic and cardiac disorders (Chan et al., 2013).

[0004] By administering probiotic Bacilli, it is possible to regenerate the intestinal flora of men and women with recurrent episodes of dysbiosis. Dysbiosis is a common gastrointestinal problem. Dysbiosis caused by Escherichia coli is also a common problem (Chan et al., 2013).

[0005] The presence of Bacilli is important for the maintenance of the intestinal microbial ecosystem. Bacilli have been shown to possess inhibitory activity toward the growth of pathogenic bacteria such as Listeria monocytogenes, Escherichia coli, Salmonella spp. and others (Yilmaz et al., 2005). This inhibition could be due to the production of inhibitory compounds such as organic acids, hydrogen peroxide, bacteriocins or reuterin or to competitive adhesion to the epithelium (Abriouel et al., 2010).

[0006] Bacilli have also been examined as a treatment of respiratory tract infections (Marseglia et al., 2007). For example, the installation of Bacilli, and stimulation of indigenous organisms has been employed to prevent recurrence of urinary tract infections (Marseglia et al., 2007). The role of Bacilli in preventing intestinal infections has also been investigated.

### DESCRIPTION OF RELATED ART

[0007] The importance of Bacilli as probiotics has been described in the literature.

[0008] Hyronimus et al, 2000 discloses the screening of probiotic activities of a number of Bacilli strains by in vitro techniques and evaluation of the colonization ability of thirteen selected strains in humans. The strains were examined for resistance to pH 2.5 and 0.3% Oxgall adhesion to Caco-2 cells and antimicrobial activities against enteric pathogenic bacteria (Khochamit et al, 2015). Bacilli have been shown to possess the primary requirement of GIT stress tolerance, besides having good adhesion and bio-therapeutic properties (Thakur et al, 2016).

[0009] Pharmaceutical compositions of Bacilli known in the art are not sufficiently efficient in recolonizing in vivo i.e., mammalian microbial ecosystems and there is, therefore, a need to find Bacilli with an inherent ability to recolonize upon administering the Bacilli in the form of a pharmaceutical composition, a nutraceutical, a dairy product, a functional food or absorbent product. Bacilli isolated from soil, may have the ability to recolonize in vivo upon administration because of their inherent ability to survive in the human microbial ecosystem. It is often a cumbersome process to identify Bacilli strains with enhanced abilities to colonize upon administration and it is therefore important to select the best test systems to predict their in vivo ability to colonize.

[0010] In the literature, there seems to be a large variation in the reported in vitro adherence of probiotic strains. This variation indeed reflects biological differences between strains, but certainly also depends on experimental conditions. Moreover, there also seems to be variation with regard to how to measure the adherence. It may be argued that an in vitro experiment only serves as a means to estimate the in vivo ability to colonize by adherence to epithelial cells.

[0011] Despite being long considered soil microorganisms, Bacillus spp. have been used for more than 50 years in the form of fermentation products or spore-based supplements (Cutting et al., 2011). Bacilli, being ubiquitous in nature, consistently enter the gastrointestinal and respiratory tracts of healthy people through food, water, and air (Benno & Mitsuoka, 1986). They have been isolated from the gut and can reach up to 10⁷ CFU/g and hence are considered to be one of the dominant components of the normal gut microbiota (Lakshmi et al., 2017).

[0012] Bacillus megaterium has been found on diverse habitats from soil to seawater, sediment, rice paddies, honey, fish, milk and dried foods (Alfoldi, 1957; Alippi & Reynaldi, 2006; Padgham and Sikora, 2007; Pelletier & Sygusch, 1990; Vary et al., 2007; Von Tersch and Carlton, 1983; Scholle et al., 2003, Kotb, 2014). Further qualitative analysis of microorganisms isolated from honeys revealed that one of the most frequent species of Bacillus is Bacillus megaterium (Alippi, 1995; Alippi et al., 2004; Snowdon & Cliver, 1996; Tysset, Durand, & Taliergio, 1970). There have been supplemental studies that have isolated Bacillus megaterium in fish (Sumathi et al., 2017). Afrilasari et al., 2015 also successfully isolated Bacillus megaterium from catfish digestive tract and identified the strain as PTB 1.4. The nonhazardous nature of Bacillus megaterium has landed the bacteria on the Qualified Presumption of Safety (QPS) list (European Food Safety Authority, 2017). Bacillus megaterium strain ATCC 14581 has been confirmed through genome-analysis to be nearly identical (>99%) to the presently claimed Bacillus megaterium MIT411. Health Canada stated the organism is not hazardous to human health or the environment; and exposure to the environment and Canadians is medium. Therefore, it is concluded that Bacillus megaterium strain ATCC 14581 is not harmful to human health or to the environment (Health Canada, 2018).

[0013] In summary, Bacilli strains with probiotic capabilities should be able to adhere to other suitable cells, such as the cell line Caco-2 cells. Moreover, it is also desirable that the Bacilli strains with probiotic capabilities show in vitro inhibitory activity against other bacterial species, produce acid after growth in liquid culture and/or produce hydrogen peroxide.

### SUMMARY OF THE INVENTION

[0014] It is an object of the present invention to provide strains and compositions as described throughout this application such as pharmaceutical formulations or absorbent products of suitable probiotic Bacilli strains with the desired properties as discussed above. In an embodiment, the present invention concerns the Bacillus megaterium MIT411 alone or in combination with other strains such as Bacilli strains such as Bacillus coagulans strain CGI314 (disclosed and claimed in corresponding PCT Application PCT/US2022/xxxxx claiming priority from Irish Patent Application No. 2021/0210, whose contents are incorporated herein in their entirety) and Bacillus clausii strain CSI08 (disclosed and claimed in corresponding PCT Application PCT/US2022/xxxxx claiming priority from Irish Patent Application No. 2021/0209, whose contents are incorporated herein in their entirety). In an embodiment, these strains have similar or essentially the same advantageous properties e.g. the ability to colonize by adherence to mucosal membranes/surfaces and which are therefore suited for the treatment or prevention of infections or diseases of the vaginal, urinary-tract, gastrointestinal, naso-sinal, pharyngeal, esophageal, oral, and/or other areas of the body with mucosal membranes, as well as, the treatment or prevention of infections or diseases of the skin and/or other areas of the body having epithelium; immune health, protection against oxidative stress, cleansing and detoxification, metabolic health and cardiovascular health amongst others such as providing antimicrobial activity, anti-inflammatory activity, suppression of pro-inflammatory response, activating and/or provoking immune response eg. by stimulating macrophages, providing immunoprotection, aiding in digestion and/or fermentation for instance in the gut, producing branched amino acides, essential amino acids and group B vitamins, maintaining healthy gut and/or skin, protection of mucosal and other epithelial tissues from toxic agents, decreasing incidence of loose stools, improving the gut-brain axis, and treating and/or preventing dysbiosis and its effects such as periodontal disease, inflammatory bowel disease, chronic fatigue syndrome, metabolic disorders, cardiac disorders, respiratory trat infections, urinary tract infections, GI infections, and diarrhea; and restoring normal and/or healthy flora. In an embodiment, the present invention allows the use of Bacillus megaterium strain MIT411 and compositions for use in fecal transplants.

[0015] Gastrointestinal diseases include, but are not limited to treating gastrointestinal irregularity in an individual, wherein the individual has at least one 24-hour episode per month of bowel movements measuring 1 or 2 on the Bristol Stool Scale (i.e. treating constipation; or wherein the individual has at least one 24-hour episode per month of bowel movements measuring 6 to 7 on the Bristol Stool Scale (tending towards diarrhoea), wherein the frequency of the individual's 24-hour episodes per month of bowel movements measuring 1 or 2 (or 6 to 7) on the Bristol Stool Scale decreases.

[0016] Also included is a method of restoring gastrointestinal regularity in an individual, wherein the individual has at least one 24-hour episode per month of bowel movements measuring 1 or 2; or 6 to 7 on the Bristol Stool Scale, wherein the frequency of 24-hour periods of the individual's bowel movements measuring from 3 to 5 on the Bristol Stool Scale increases.

[0017] The invention further includes maintaining healthy gut microflora, with Bacillus-containing composition(s). The Bacillus-containing composition(s) can be used as probiotic supplementation of the gastrointestinal microflora, and may compete with or otherwise discourage pathogenic bacteria in the gut such as Escherichia coli, Listeria monocytogenes, Salmonella spp.

[0018] Another object of the present invention is to provide pharmaceutical formulations with an increased ability to colonize by adherence to the mucosal membrane by employing mucous adhesive excipients.

[0019] It is a further object of the present invention to provide vaginal formulations with an increased ability to suppress the growth of Candida albicans and Gram-negative pathogenic bacteria.

[0020] It is yet another objective of the present invention to provide compositions such as dairy products, nutraceutical products and functional foods comprising Bacillus megaterium MIT411 strain alone or combination with other Bacilli strains such as a Bacillus coagulans strain and a Bacillus clausii strain, having essentially the same properties having the ability to colonize the mucosal membranes and therefore adapted to treatment or prevention of vaginal infections, urinary-tract infections and gastrointestinal diseases. Compositions of the present invention may be administered for 1 dose, 1 day, 1 day to 1 week, 1 day to 1 month, 1 month to 45 days, 45 days to 2 months, 3 months, 6 months, 1 year, or more, including any timeframe identified and/or falling within these ranges.

### FIGURES

[0021] In the drawings:

[0022] FIG. 1 illustrates the genome analysis of Bacillus megaterium MIT411.

[0023] FIG. 2 illustrates the phylogenetic tree (16S) of Bacillus spp, arranged in clades.

[0024] FIG. 3 illustrates the phylogenetic tree (gyrB) of Bacillus spp., arranged in clades.

[0025] FIG. 4 shows stability of Bacillus megaterium in phosphate saline buffer during a pasteurization process; results show average concentration±standard deviation.

[0026] FIG. 5 shows Renuspore antimicrobial activity against gut, skin, and urinary tract opportunistic pathogens in solid media (TSA).

[0027] FIG. 6 shows B. megaterium MIT411 antimicrobial activity in liquid TSB media against gut, skin and urinary tract opportunistic pathogens: E. coli (*p<0.05), Salmonella enteritidis (****p<0.0001), Pseudomonas aeruginosa (****p<0.0001), and S. aureus.

[0028] FIG. 7 shows total antioxidant capacity of PBS and B. megaterium.

[0029] FIG. 8A shows heavy metal bioaccumulation by Renuspore in TSB media supplemented with 1 ppm of lead.

[0030] FIG. 8B shows heavy metal bioaccumulation by Renuspore in TSB media supplemented with 1 ppm of mercury.

[0031] FIG. 9 shows iron concentration in the extracellular fraction of Renuspore.

[0032] FIG. 10 shows calcium concentration in the extracellular fraction of Renuspore.

[0033] FIG. 11 shows magnesium concentration in the extracellular fraction of Renuspore.

[0034] FIG. 12 shows B. megaterium does not affect Bisphenol A concentrations in TST or MM media.

[0035] FIG. 13 shows nitrite concentration in the extracellular matrix of Renuspore.

[0036] FIG. 14A shows degradation of ammonia by Renuspore.

[0037] FIG. 14B shows the concentration of Ammonia remaining in TSB+1 mM Ammonia following incubation with Renuspore Vs Control, at 37° C. for 24 hours.

[0038] FIG. 15 shows adherence of B. megaterium MIT411 spores and vegetative cells to HT-29 and HT-29 MTX cells at 37° C.

[0039] FIG. 16 shows caseolytic activity of Bacillus megaterium MIT411 (Positive) versus B. coagulans (negative), detected by conventional method with skim milk agar medium at 24 hours.

[0040] FIG. 17 shows Renuspore showed protease activity using quantitative extracellular protease analysis using EnzCheck Kit.

[0041] FIG. 18 shows FAA increased in Renuspore UHT fermented milk samples.

[0042] FIG. 19 shows FAA increased in Renuspore UHT fermented milk samples.

[0043] FIG. 20 shows FAA increased in Renuspore UHT fermented milk samples.

[0044] FIG. 21 shows FAA increased in Renuspore UHT fermented milk samples.

[0045] FIG. 22 shows SCFA increased in Renuspore UHT fermented milk samples.

[0046] FIG. 23 shows Fibersol® did not significantly increase the concentration (CFU/mL) of Renuspore in minimal media 24 hours post incubation compared to controls.

[0047] FIGS. 24 and 25 show that Renuspore increased the expression of cytokines in a human macrophage cell culture model.

[0048] FIG. 26 shows that Renuspore did not increase C. elegans survival after exposure to H₂O₂.

[0049] FIG. 27 shows the adhesion ability of Bacillus megaterium MIT411 vegetative cells and spores in intestinal epithelial cell lines HT-29 and HT-29-MTX at 37° C.

[0050] FIG. 28 shows a graphical flow chart of the study design.

[0051] FIG. 29 shows the probiotic cocktail administered during the study significantly decreased the incidence of loose stool over the course of the study as compared to placebo control.

[0052] FIG. 30 shows no effect of any treatments administered during the study on percentage of hard stools as compared to placebo control.

[0053] FIG. 31 is a boxplot showing the Chao1 values distribution in each experimental group for Day 1 and Day 45 of the study. Dotted lines connect the paired samples. A paired Wilcoxon test was used to compare the distribution of the groups.

[0054] FIG. 32 is a boxplot showing the Chao1 values distribution in each experimental group for Day 1 and Day 45 of the study. A Wilcoxon test was used to compare the distribution of each experimental group against the Placebo.

[0055] FIG. 33 illustrates PCoA clustering performed on the Bray-Curtis dissimilarity matrix.

### DETAILED DESCRIPTION OF THE INVENTION

### Genotypic Identification

[0056] The Applicant collaborated with Cornell University (Ithaca NY, USA) for genomic sequencing and identification.

### WGS DNA Composition

[0057] The whole genome sequence (WGS) was carried out by Cornell University, including assembly and annotation. Bioinformatics analysis was completed at Cornell University and at Deerland Probiotics and Enzymes (Kennesaw, GA, USA). Identifying gyrB gene polymorphism was carried out the Applicant.

[0058] The gyrB gene encodes DNA gyrase subunit B. DNA gyrase negatively supercoils closed circular double-stranded DNA in an ATP-dependent manner to maintain chromosomes in an underwound state. Gene sequencing analysis used the gyrB gene polymorphism, a well-established method for species level discrimination of prokaryotes (Bavykin et al., 2014; Wang et al., 2007). The representative genomes were reviewed and curated by NCBI, and coordinated with the UniProtein Consortium (NCBI, 2016; UniProt, 2016). R package SequinR coupled with the UniProt Consortium analysis was used to compare whole genome sequences (WGS) and GyrB sequence of the presently claimed Bacillus coagulans strain CGI314 with other reference strains (Tables A, B and C below)

[0059] Genotypic, gyrB, & 16S rRNA Identification of Bacillus megaterium MIT411

[0060] MIT411 isolate, and the genome was considered successful.

[0061] The genome size (5.4 MBP) and GC content (37.8%) for the isolate was comparable for Bacillus megaterium strains.

TABLE A
Whole genome sequencing metrics of MIT411.

| | | Number of | Total | GC | N50 | average |
|---|---|---|---|---|---|---|
| Strain | Attempt | contigs | length (nt) | (%) | (nt) | coverage |
| Bacillus | 1 | 382 | 5,385,509 | 37.85 | 44,246 | 35.0569 |
| megaterium | | | | | | |
| MIT-411 | | | | | | |
| Bacillus | 2 | 156 | 5,416,213 | 37.81 | 160,002 | 79.29 |
| megaterium | | | | | | |
| MIT-411 | | | | | | |

TABLE B
Distance matrix of gyrB gene.

| Bacillus megaterium subsp. | ATCC 14581 |
|---|---|
| MIT411 | 99.9 |

TABLE C
Whole genome sequence comparison

| Bacillus megaterium subsp. | Accession No. | % GC | Sequence Length |
|---|---|---|---|
| MIT411 | JABBNK000000000.1 | 37.81 | 5,416,213 |
| ATCC 14581 | GCA_000764085.1 | 37.73 | 5,727,066 |

16S rRNA

[0062] Whole genome sequencing (WGS) and 16S rRNA analysis of MIT-411, as compared to one reference strain, exhibited an average nucleotide identity (ANI) score for 16S rRNA of >99% when compared to Bacillus megaterium ATCC-14581. The genome size (5.4 Mbp) and GC content (37.8%) for Bacillus megaterium MIT-411 was comparable to the reference strain.

### Further Deposits and Accession Numbers

[0063] Genome sequence data of Bacillus megaterium strain MIT411 (Renuspore) was deposited into NCBI GenBank database, and the genome sequence was annotated with the NCBI Prokaryotic Genome Annotation Pipeline (PGAP). The genome is publicly available, with GenBank Accession Number JABBNK000000000.1 for the strain, and available for instance at the link: Priestia megaterium strain MIT411, whole genome shotgun sequencing pro-Nucleotide-NCBI (nih.gov).

[0064] Genome sequence data of Bacillus clausii strain CSI08 (Munispore) was deposited into NCBI GenBank database, and the genome sequence was annotated with the NCBI Prokaryotic Genome Annotation Pipeline (PGAP). The genome is publicly available, with GenBank Accession Number JABBNL000000000.1 for the strain, and available for instance at the link: Alkalihalobacillus clausii strain CSI08, whole genome shotgun sequenci-Nucleotide-NCBI (nih.gov).

[0065] Genome sequence data of Bacillus coagulans strain CGI314 (Fortispore) was deposited into NCBI GenBank database, and the genome sequence was annotated with the NCBI Prokaryotic Genome Annotation Pipeline (PGAP). The genome is publicly available, with GenBank Accession Number JABBFU000000000.1 for the strain, and available for instance at the link: https://www.ncbi.nlm.nih.gov/nuccore/JABBFU000000000.1.

[0066] Phylogenetic Placement, carried out by Deerland Probiotics and Enzymes, Inc.

[0067] Genome-to-genome distance calculation (GGDC), a digital gold standard, is as reliable as DNA-DNA hybridization (DDH) (Auch et al. 2010). GGDC holds more discriminatory power for subspecies delineation and subsequently, was used as a confirmation of multiple alignment and phylogenetic analyses. GGDC verified that Bacillus megaterium MIT411 is a close relative to ATCC 14581.

[0068] Although the conserved 16S rRNA sequence is a well-established method to compare and study phylogenies in bacteria, the high proportion of sequence similarity between closely related species limits its usefulness (Wang et al., 2007). High rates of 16S rRNA sequence similarity in closely related bacterial species are due to a slower rate of molecular evolution. Past research (Bavtlin et al., 2004; Wang et al., 2007) supports the validity of using gyrB sequences as taxomonic biomarkers due to their rate of base substitutions and significant and reliable correlation with DNA-DNA Hybridization analysis (Dauga et al., 2002; Kasai et al., 1998; Wang et al., 2007). The gyrB encodes DNA gyrase B, and type II topoisomerase that plays an important role in DNA replication. Gyrase B subunits are encoded by the gyrB gene.

[0069] Phylogenetic analysis using neighbor-joining (NJ) method (Saitou & Nei, 1987) placed Bacillus megaterium MIT411 in a clade with Bacillus megaterium ATCC 15481 (FIG. 2). This confirms all previous genomic identity determinations. Bacillus megaterium MIT411 has been placed in the Bacillus megaterium group.

### Definitions

[0070] By “excipient” is meant any non-active ingredient that is added to form part of the final formulation.

[0071] By “probiotic” is meant a viable microbial supplement, which has a beneficial influence on a subject through its effects in the intestinal tract, urinary tract, vaginal tract, skin, and/or other area of a subject's body. The term can refer to live microorganisms which, when administered in adequate amounts, confer a health benefit on the host. Foods and food additives containing probiotics may support the restoration of the healthy balance of the gut microflora. Further, probiotic supplementation of the intestinal flora may promote healthy intestinal homeostasis.

[0072] A “prebiotic” is used herein as a substrate, which has a beneficial effect on a probiotic and thus on the individual subject taking (e.g. administered) the probiotic. Suitable prebiotics may be selected from an inulin, an oligosaccharide, and/or a vitamin.

[0073] A “subject” as used herein includes a person suffering from any clinical condition related to a microbial imbalance as well as a person using bacterial preparations prophylactically, for wellness, or any other purpose including for instance benefitting from the administration of a Bacillus megaterium strain of this invention (e.g. MIT411). Optionally, the subject is a human, a patient, and/or a mammal.

[0074] By a “symbiotic product” is meant a combination of probiotic and prebiotic, which is synergy, have a beneficial influence on the patient.

[0075] By “hardy growth” is meant that bacteria show excellent growth.

[0076] The abbreviation “CFU” means colony forming units.

[0077] The present invention relating to a probiotic Bacilli strain capable of regenerating the in vivo flora in subjects will become apparent in the progress of the following detailed description.

[0078] According to a first aspect, the present invention comprises Bacillus megaterium MIT411 alone or in combination with other probiotic Bacilli strains with essentially the same properties. Such other probiotic Bacilli stains include, but are not limited to a Bacillus clausii strain and a Bacillus coagulans strain. Such other Bacilli strains further include a Bacillus clausii strain and a Bacillus coagulans strain each filed today under these respective titles-their contents are incorporated herein in their entirety.

[0079] SEQ ID NO: 1, as recited in the claims attached hereto, comprises gyrB of Bacillus megaterium MIT411.

[0080] SEQ ID NO: 2, as recited in the claims attached hereto, comprises 16S rRNA of Bacillus megaterium MIT411.

[0081] SEQ ID NO: 3, as recited in the claims attached hereto, comprises the assembled whole genome sequence of Bacillus megaterium MIT411.

[0082] The Bacillus strain claimed herein, with reference to at least 97% identity to SEQ ID NO: 1 and/or 2; or to at least 97% identity to SEQ ID NO: 3, has the following properties:

Bacillus megaterium MIT411:

[0083] The strain shows bile stability.

[0084] The strain shows acid stability.

[0085] The strain shows heat tolerance.

[0086] The strain produces a natural antibiotic substance in the form of bacteriocins.

[0087] In order to determine the genus and species of the strains disclosed herein, the whole genome was sequenced. The amount and composition of the strains were identified and determined.

[0088] The strain was shown to possess little to no antibiotic resistance and no safety concerns.

[0089] The strain was found to show stability toward acid and bile.

[0090] According to a second aspect, the Bacilli strain of the present invention is suitable for medical use in preventing or treating vaginal infections, urinary tract infections and gastrointestinal diseases (including gastrointestinal infections), as well as, improving immune health, protection against oxidative stress, cleansing and detoxification, metabolic health and cardiovascular health.

[0091] In another preferred embodiment, a composition such as a pharmaceutical composition is provided comprising Bacillus megaterium MIT411 alone or in combination with other probiotic Bacilli strains with similar and/or essentially the same properties, together with a pharmaceutically acceptable carrier and/or diluent. Such other probiotic Bacilli stains include, but are not limited to a Bacillus clausii strain and a Bacillus coagulans strain. The bacterial strains are formulated into compositions such as pharmaceutical formulations in order to allow the easy administration of the probiotic strains and by means known to the man skilled in the art.

[0092] Bacillus coagulans has been proven able to alleviate symptoms of irritable bowel syndrome (Sudha et al., 2018), improve muscle integrity and cytokine response (Gepner et al., 2017; Jager et al., 2018), modulate the gut microbiome and the immune response (Kimmel et al., 2010), reduce function intestinal gas symptoms (Kalman et al., 2009), reduce the instance and duration of diarrhea (Dolin et al., 2009), improve the symptoms of functional abdominal pain and bloating (Hun et al., 2009), protect against acetaminophen induced acute liver injury (Neag et al., 2020), enhance butyrogenesis (Sasaki et al., 2020), reduce severity of bacterial vaginosis (Sudha et al., 2012), and reduce cholesterol (Sudha et al., 2012) all in vivo. Bacillus coagulans has also shown to induce immune response and anti-inflammatory action (Jensen et al., 2017), improve plant protein digestion (Keller et al., 2017), adhere to Caco-2 cells (Sharma & Kanwar, 2017), improve colonic microenvironment in patients with ulcerative colitis (Sasaki et al., 2020), reduce the adhesion, cytotoxicity and induction of apoptosis caused by S. typhimurium in HT-29 cells (Kawarizadeh et al., 2019), hydrolyze lactose from whey protein (Liu et al., 2019), and enhancing t-cell response (Baron, 2009) all in vitro.

[0093] Bacillus clausii has been proven efficacious in preventing recurrent respiratory infections (Marseglia et al., 2007), reducing duration and severity of diarrhoea (Sudha et al., 2019) in vivo. Bacillus clausii has also been proven capable to produce protein hydrolysates with antimicrobial and antioxidant capacity (Rochin-Medina et al., 2017), protect against acetaminophen induced acute liver injury (Neag et al., 2020), inhibit cytotoxic effects induced by Clostridium difficile and Bacillus cereus toxins (Ripert et al., 2016) in vitro.

[0094] Bacillus megaterium has been shown to exert protective effects against oxidative stress both in vitro and in vivo (Mazzoli et al., 2019). Bacillus megaterium has also been shown capable of adapting and surviving in acid stress conditions and chelating heavy metals in vitro (Ferreira et al., 2019).

[0095] Preferably, the probiotic bacteria employed in a pharmaceutical in accordance with the present invention are used in bacterial concentration of 10⁶-10¹³. CFU (colony forming units), for instance as a daily dose, including any amount or range that is included in said range. In an embodiment, the bacteria are employed in an amount of 10⁷-10¹² CFU, or 10⁸-10¹¹ CFU, or 10⁹-10¹⁰ CFU, or for instance in an amount of about 10⁶, about 10⁷, about 10⁸, about 10⁹, about 10¹⁰, about 10¹¹, about 10¹², and/or about 10¹³ CFU, and any amount or range including or between said amounts. In an embodiment, a composition of this invention comprises, consists essentially of, consists of, and/or is characterized by about 10⁶-about 10¹³ CFU such as about 10⁹ Bacillus megaterium MIT411. In an embodiment, a composition of this invention comprises Bacillus megaterium MIT411 (for instance about 10⁹ CFU) in combination with Bacillus clausii CSI08 and/or Bacillus coagulans CGI314. In an embodiment, a composition of this invention is orally administered in capsule form. In an embodiment, Bacillus megaterium MIT411 is in spore form, or is not in spore form.

[0096] In certain embodiments, compositions comprising Bacillus megaterium MIT411 can include one or more dry carriers selected from the group consisting of trehalose, maltodextrin, rice flour, microcrystalline cellulose, magnesium stearate, inositol, fructooligosaccharide, galactooligosaccharide, dextrose, dried dairy products, and the like. In certain embodiments, the dry carrier can be added to the compositions comprising Bacillus megaterium MIT411 in a weight percentage of from about 1% to about 95% by weight of the composition.

[0097] In certain embodiments, the compositions comprising Bacillus megaterium MIT411 can include one or more liquid or gel-based carriers, selected from the group consisting of water and physiological salt solutions, urea, alcohols and derivatives thereof (e.g., methanol, ethanol, propanol, butanol), glycols (e.g., ethylene glycol, propylene glycol), and the like; natural or synthetic flavorings and food-quality coloring agents, all compatible with the organism; thickening agents selected from the group consisting of corn starch, guar gum, xanthan gum, and the like; one or more spore germination inhibitors selected from the group consisting of hyper-saline carriers, methylparaben, guargum, polysorbate, preservatives, and the like. In certain embodiments, the one or more liquid or gel-based carrier(s) can be added to the compositions comprising Bacillus megaterium MIT411 in a weight/volume percentage of from about 0.6% to about 95% weight/volume of the composition. In certain embodiments, the natural or synthetic flavoring(s) can be added to the compositions comprising Bacillus megaterium MIT411 in a weight/volume percentage of from about 3.0% to about 10.0% weight/volume of the composition. In certain embodiments, the coloring agent(s) can be added to the compositions comprising Bacillus megaterium MIT411 in a weight/volume percentage of from about 1.0% to about 10.0% weight/volume of the composition. In certain embodiments, the thickening agent(s) can be added to the compositions comprising Bacillus megaterium MIT411 in a weight/volume percentage of about 2% weight/volume of the composition. In certain embodiments, the one or more spore germination inhibitors can be added to the compositions comprising Bacillus megaterium MIT411 in a weight/volume percentage of about 1% weight/volume of the composition.

### Delivery System

[0098] Suitable dosage forms include tablets, capsules, solutions, suspensions, powders, gums, and confectionaries. Sublingual delivery systems include, but are not limited to, dissolvable tabs under and on the tongue, liquid drops, and beverages. Edible films, hydrophilic polymers, oral dissolvable films, or oral dissolvable strips can be used. Other useful delivery systems comprise oral or nasal sprays or inhalers, and the like. Suitable dosage forms include tablets, capsules, solutions, suspensions, powders, gums, and confectionaries. Sublingual delivery systems include, but are not limited to, dissolvable tabs under and on the tongue, liquid drops, and beverages. Edible films, hydrophilic polymers, oral dissolvable films, or oral dissolvable strips can be used. Other useful delivery systems comprise oral or nasal sprays or inhalers, and the like.

[0099] For oral administration, probiotics may be further combined with one or more solid inactive ingredients for the preparation of tablets, capsules, pills, powders, granules, or other suitable dosage forms. For example, the active agent may be combined with at least one excipient selected from the group consisting of fillers, binders, humectants, distintegrating agents, solution retarders, absorption accelerators, wetting agents, absorbents, and lubricating agents. Other useful excipients include, but are not limited to, magnesium stearate, calcium stearate, mannitol, xylitol, sweeteners, starch, carboxymethylcellulose, microcrystalline cellulose, silica, gelatin, silicon dioxide, and the like

[0100] In certain embodiments, the components of compositions administered according to the methods of the present disclosure, together with one or more conventional adjuvants, carriers, or diluents, may thus be placed into the form of pharmaceutical compositions and unit dosages thereof. Such forms include: solids, and in particular, tablets, filled capsules, powder and pellet forms; liquids, and in particular, aqueous or non-aqueous solutions, suspensions, emulsions, elixirs; and capsules filled with the same; all for oral use, suppositories for rectal administration, and sterile injectable solutions for parenteral use. Such pharmaceutical compositions and unit dosage forms thereof may comprise conventional ingredients in conventional proportions, with or without additional active compounds or principles, and such unit dosage forms may contain any suitable effective amount of the active ingredient commensurate with the intended daily dosage range to be employed.

[0101] The components of the compositions administered according to the methods of the present disclosure can be administered in a wide variety of oral and parenteral dosage forms. It will be obvious to those skilled in the art that the following dosage forms may comprise, in certain embodiments, as the active component, either a chemical compound of the present disclosure or a pharmaceutically acceptable salt of a chemical compound of the present disclosure.

[0102] For preparing pharmaceutical compositions to be administered according to the methods of the present disclosure, pharmaceutically acceptable carriers can be either solid or liquid. Solid form preparations include powders, tablets, pills, capsules, cachets, suppositories, and dispersible granules. A solid carrier can be one or more substances that may also act as diluents, flavoring agents, solubilizers, lubricants, suspending agents, binders, preservatives, tablet disintegrating agents, or encapsulating materials.

[0103] In powders, the carrier is a finely divided solid, which is in a mixture with the finely divided active component. In tablets, the active component is mixed with the carrier having the necessary binding capacity in suitable proportions and compacted in the shape and size desired.

[0104] In certain embodiments, powders and tablets administered according to methods of the present disclosure preferably may contain from five or ten to about seventy percent of the active compound. Suitable carriers are magnesium carbonate, magnesium stearate, talc, sugar, lactose, pectin, dextrin, starch, gelatin, tragacanth, methylcellulose, sodium carboxymethylcellulose, a low melting wax, cocoa butter, and the like. The term “preparation” is intended to include the formulation of the active compound with encapsulating material as carrier providing a capsule in which the active component, with or without additional carriers, is surrounded by a carrier, which is thus in association with it. Similarly, cachets and lozenges are included. Tablets, powders, capsules, pills, cachets, and lozenges are included. Tablets, powders, capsules, pills, cachets, and lozenges can be used as solid forms suitable for oral administration.

[0105] Liquid preparations include, but are not limited to, solutions, suspensions, and emulsions, for example, water or water-propylene glycol solutions. For example, parenteral injection liquid preparations can be formulated as solutions in aqueous polyethylene glycol solution. In certain embodiments, chemical compounds administered according to methods of the present disclosure may thus be formulated for parenteral administration (e.g., by injection, for example, bolus injection or continuous infusion) and may be presented in unit dose for administration in ampoules, pre-filled syringes, small-volume infusion, or in multi-dose containers with an added preservative. The compositions may take such forms as suspensions, solutions, or emulsions in oily or aqueous vehicles, and may contain formulation agents such as suspending, stabilizing, and/or dispersing agents. Alternatively, the active ingredient may be in powder form, obtained by aseptic isolation of sterile solid or by lyophilization from solution, for constitution with a suitable vehicle, e.g., sterile, pyrogen-free water, before use.

[0106] Aqueous solutions suitable for oral use can be prepared by dissolving the active component in water and adding suitable colorants, flavors, stabilizing and thickening agents, as desired. Aqueous suspensions suitable for oral use can be made by dispersing the finely divided active component in water with viscous material, such as natural or synthetic gums, resins, methylcellulose, sodium carboxymethylcellulose, or other well-known suspending agents.

[0107] Compositions suitable for topical administration in the mouth include, but are not limited to: lozenges comprising the active agent in a flavored base, usually sucrose and acacia or tragacanth; pastilles comprising the active ingredient in an inert base such as gelatin and glycerine or sucrose and acacia; and mouthwashes comprising the active ingredient in suitable liquid carrier.

[0108] Solutions or suspensions are applied directly to the nasal cavity by conventional means, for example, with a dropper, pipette, or spray. The compositions may be provided in single or multi-dose form. In compositions intended for administration to the respiratory tract, including intranasal compositions, the compound will generally have a small particle size, for example, of the order of 5 microns or less. Such a particle size may be obtained by means known in the art, for example, by micronization.

[0109] The pharmaceutical preparations are preferably in unit dosage forms. In such form, the preparation is subdivided into unit doses containing appropriate quantities of the active component. The unit dosage form can be a packaged preparation, the package containing discrete quantities of preparation, such as packaged tablets, capsules, and powders in vials or ampoules. Also, the unit dosage form can be a capsule, tablet, cachet, or lozenge itself; or it can be the appropriate number of any of these in packaged form.

[0110] Tablets, capsules, and lozenges for oral administration and liquids for oral use are preferred compositions. Solutions or suspensions for application to the nasal cavity or to the respiratory tract are preferred compositions. Transdermal patches for topical administration to the epidermis are preferred.

[0111] Further details on techniques for formulation and administration may be found in the latest edition of REMINGTON'S PHARMACEUTICAL SCIENCES (Mack Publishing Co., Easton, PA).

[0112] In certain embodiments, compositions of the present invention including compositions administered according to the methods of the present disclosure may also include one or more excipients, most preferably one or more nutraceutical or pharmaceutical excipients. Compositions containing one or more excipients and incorporating one or more probiotics can be prepared by procedures known in the art. Optionally, compositions can include one or more adjuvants, excipients, carriers, buffers, diluents, and/or other customary pharmaceutical auxiliaries. For example, probiotics can be formulated into tablets, capsules, powders, suspensions, solutions for oral administration, solutions for parenteral administration including intravenous, intradermal, intramuscular, and subcutaneous administration, and solutions for application onto patches for transdermal application with common and conventional barriers, binders, diluents, and excipients.

[0113] In certain embodiments, nutraceutical compositions including nutraceutical compositions administered according to the methods of the present disclosure may include and may be administered in combination with a pharmaceutically acceptable carrier. In certain embodiments, the active ingredients in such formulations may comprise from about 1% by weight to about 99% by weight. In other embodiments, the active ingredients in such formulations may comprise from about 0.1% by weight to about 99.9% by weight. “Pharmaceutically acceptable carrier” means any carrier, diluent, or excipient that is compatible with the other ingredients of the formulation and not deleterious to the user. Useful excipients include, but are not limited to, microcrystalline cellulose, magnesium stearate, calcium stearate, any acceptable sugar (e.g., mannitol, xylitol), and the like, and for cosmetic use, a water or an oil base may be used, or mixture thereof including such as an emulsion.

### Routes of Administration

[0114] The compounds may be administered by any route, including, but not limited to, oral, sublingual, buccal, ocular, pulmonary, rectal, and parenteral administration, or as an oral or nasal spray (e.g., inhalation of nebulized vapors, droplets, or solid particles). Parenteral administration includes, for example, intravenous, intramuscular, intraarterial, intraperitoneal, intranasal, intravaginal, intravesical (e.g., to the bladder), intradermal, transdermal, topical, or subcutaneous administration. Also contemplated within the scope of the invention is the instillation of a pharmaceutical composition in the body of the patient in a controlled formulation, with systemic or local release of the drug to occur at a later time. For example, the drug may be localized in a depot for controlled release to the circulation, or for release to a local site.

[0115] Pharmaceutical compositions of the invention may be those suitable for oral, rectal, bronchial, nasal, pulmonal, topical (including buccal and sub-lingual), transdermal, vaginal or parenteral (including cutaneous, subcutaneous, intramuscular, intraperitoneal, intravenous, intraarterial, intracerebral, intraocular injection, or influsion) administration, or those in a form suitable for administration by inhalation or insufflation, including powders and liquid aerosol administration, or by sustained release systems. Suitable examples of sustained release systems include semipermeable matrices of solid hydrophobic polymers containing the compound of the invention, which matrices may be in the form of shaped articles, e.g., films or microcapsules.

[0116] The embodiments described above may be further understood in connection with the following Examples. In addition, the following non-limiting examples are provided to illustrate the invention. However, the person skilled in the art will appreciate that it may be necessary to vary the procedures for any given embodiment of the invention, e.g., vary the order or steps.

### EXAMPLES

### Example 1

Further Characterisation of Bacillus megaterium MIT411 (Also Referred to Hereinafter as Renuspore)

### Temperature Stability

[0117] B. megaterium MIT411 in PBS-pH 7.51-remains stable in PBS at 45° C., 75° C. and 90° C. from 30 seconds to 3 minutes (FIG. 4).

[0118] Renuspore is stable in a pasteurization process and during other manufacturing methodologies in food & beverage and other applications.

[0119] FIG. 4 shows stability of Bacillus megaterium in phosphate saline buffer during a pasteurization process; results show average concentration±standard deviation.

### Antimicrobial Activity Against Gut and Skin Pathogens in Solid Environments:

[0120] B. megaterium MIT411 (Renuspore) had weak antimicrobial activity with a hazy zone of inhibition observed against E. coli, Salmonella enteritidis and S. aureus on TSA overlayed with 0.4% TSA agar (FIG. 5 and Table 1). No antimicrobial activity was observed against P. aeruginosa in solid media.

TABLE 1
Renuspore antimicrobial activity against gut, skin and urinary
tract opportunistic pathogens in solid media (TSA).

| Probiotic | Zone of inhibition diameter (mm) | | | |
|---|---|---|---|---|
| strain | E. coli | S. enteritidis | S. aureus | P. aeruginosa |
| MIT411 | 18.9 ± 0.9 | 18.7 ± 1.2 | 18.67 ± 0.58 | — |

Antimicrobial activity indicated as zone of inhibition (mm) ± standard deviation.

[0121] FIG. 5 shows Renuspore antimicrobial activity against gut, skin, and urinary tract opportunistic pathogens in solid media (TSA). A hazy inhibition zone is observed around B. megaterium MIT411 growth. Antimicrobial activity is indicated as a zone of inhibition (mm) standard deviation. A—E. coli and B—S. enteritidis and C—S. aureus.

[0122] Renuspore demonstrated a broad antimicrobial profile being active against the gut pathogen Salmonella enteritidis and the opportunistic intestinal and urinary tract pathogen E. coli in solid media. Renuspore was also active against the opportunistic skin pathogen S. aureus.

[0123] Renuspore has the potential to crowd out bacterial pathogens and maintain healthy gut and skin microbiota.

### Antimicrobial Activity Against Gut and Skin Pathogens in Liquid Environments:

[0124] FIG. 6 shows B. megaterium MIT411 antimicrobial activity in liquid TSB media against gut, skin and urinary tract opportunistic pathogens: E. coli, Salmonella enteritidis, Pseudomonas aeruginosa and S. aureus. Control represents growth of pathogen individually; treatment represents growth of pathogen in the presence of B. megaterium MIT411. *p<0.05 and ****p<0.0001.

[0125] Renuspore inhibited the growth of the gut pathogen Salmonella enteritidis and opportunistic intestinal and urinary tract pathogen E. coli in liquid media. Renuspore was active against the opportunistic skin and urinary tract pathogen P. aeruginosa in liquid media conditions.

[0126] Renuspore has the potential to crowd out bacterial pathogens and maintain healthy gut and skin microbiota.

### Antimicrobial Activity Against Gut and Skin Pathogens in Liquid Environments:

[0127] B. megaterium MIT411 (Renuspore) had significant antimicrobial activity against Salmonella enteritidis and P. aeruginosa in liquid TSB media (FIG. 6 and Table 2). Weak antimicrobial activity was detected against E. coli and no antimicrobial activity was observed against S. aureus under these conditions.

TABLE 2
B. megaterium MIT411 summarized antimicrobial activity against
gut, skin and urinary tract opportunistic pathogens.

| | Inhibition capacity | | | |
|---|---|---|---|---|
| Conditions | E. coli | S. enteritidis | S. aureus | P. aeruginosa |
| Solid media | + | + | + | − |
| Liquid media | + | + | − | + |

Antimicrobial activity detected (+), no antimicrobial activity observed (−).

[0128] Renuspore has the potential to crowd out bacterial pathogens and maintain healthy gut and skin microbiota.

Antioxidant Activity: Total Antioxidant Activity of Renuspore B. megaterium was Compared with L. rhamnosus.

[0129] FIG. 7 shows total antioxidant capacity of PBS and B. megaterium. Results show average concentration of Trolox equivalents in nmole/ml (n=3)±standard error. Renuspore is higher in antioxidant levels compared to potential probiotic L. rhamnosus (not shown).

[0130] Renuspore shows a significant antioxidant level and is not significantly different from Fortispore (Bacillus coagulans CGI314) according to Tukey's multiple comparison tests.

Renuspore Bioaccumulates Lead and Removes it from the Environment:

[0131] Renuspore can eliminate 37.97% of bioavailable lead (FIG. 8A). Renuspore has also proved to be efficient in bioaccumulating heavy metals.

[0132] FIG. 8A shows heavy metal bioaccumulation by Renuspore in TSB media supplemented with 1 ppm of lead. Results show average concentration in ppm (n=5)±standard error. Significant reduction observed between Renuspore and control is indicated: ***p=0.001.

[0133] Renuspore has the capacity to bioaccumulate the most commonly present heavy metal in our environment—lead. These data show the potential of Renuspore to bioaccumulate environmental contaminants such as heavy metals present in the environment and prevent their harmful effects.

[0134] Renuspore can act as a potential probiotic for bio-removal of heavy metals, thereby alleviating the effects of heavy metals in the human body.

### Heavy Metal Bioaccumulation—Mercury:

[0135] Renuspore can effectively bioaccumulate mercury reducing 85.80% free bioavailable mercury. (FIG. 8B).

[0136] FIG. 8B shows heavy metal bioaccumulation by Renuspore in TSB media supplemented with 1 ppm of mercury. Results show average concentration in ppm (n=5)±standard error. Significant reduction observed between Renuspore and control is indicated: ****p<0.0001.

[0137] Renuspore has the capacity to bioaccumulate the two most commonly present heavy metals in our environment—lead and mercury. Altogether, these data show the potential of Renuspore to bioaccumulate environmental contaminants such as heavy metals present in the environment and prevent their harmful effects.

[0138] Renuspore can act as a potential probiotic for bio-removal of heavy metals, thereby alleviating the effects of heavy metals in the human body.

### Iron Bioaccumulation:

[0139] Renuspore was grown in TSB media in the presence of iron and its supernatants were assayed. TSB media+Iron was used as control. The results revealed that Renuspore does not bioaccumulate iron in TSB media as the concentration of iron in the extracellular fraction remained unchanged (FIG. 9).

[0140] FIG. 9 shows iron concentration in the extracellular fraction of Renuspore. Results show average concentration of total iron concentration in nmole/ml (n=3)±standard error.

[0141] Renuspore can act as a potential probiotic for bio-removal of the toxic heavy metal without compromising the body's natural absorption of essential minerals like iron.

Renuspore does not Bioaccumulate Calcium:

[0142] Renuspore was grown in TSB media in the presence of calcium and their supernatants were assayed. TSB media+calcium was set as control. Renuspore does not bioaccumulate calcium in TSB media as the calcium concentration in the supernatant remained unchanged (FIG. 10).

[0143] FIG. 10 shows calcium concentration in the extracellular fraction of Renuspore. Results show average concentration of calcium concentration in μM (n=3)±standard error using Dunnett's test.

[0144] Renuspore can act as a potential probiotic for bio-removal of the toxic heavy metal without compromising the body's natural absorption of essential minerals like calcium.

Renuspore does not Bioaccumulate Magnesium:

[0145] Renuspore was grown in TSB media in the presence of magnesium and their supernatants were assayed. TSB media+magnesium was set as control. Using Dunnett's test, results revealed that Renuspore was not significantly different compared to the control (TSB media). This shows that Renuspore does not bioaccumulate magnesium from the environment (FIG. 11).

[0146] FIG. 11 shows magnesium concentration in the extracellular fraction of Renuspore. Results show average concentration of magnesium concentration in mmol/L (n=3)±standard error using Dunnett's test.

[0147] This study showed how Renuspore does not bioaccumulate magnesium and won't compete with the intestinal tract for the absorption of this essential mineral.

[0148] Renuspore can act as a potential probiotic for bio-removal of the toxic heavy metal without compromising the body's natural absorption of essential minerals like magnesium, iron and calcium.

Renuspore does not Utilize or Degrade Bisphenol A (BPA):

[0149] Bacillus megaterium MIT411 (also known as Renuspore) failed to utilize BPA as a sole carbon source as no growth was identified in minimal media (MM) agar and broth across all the BPA concentrations analyzed (5 mg/L to 100 mg/L). Cell growth of B. megaterium decreased with increasing BPA concentrations (Table 3). B. megaterium did not decrease 5 mg/L BPA concentration overtime in both MM and TSB broth (FIG. 12).

[0150] FIG. 12 shows B. megaterium does not affect Bisphenol A concentrations in TST or MM media. (Far left vertical bar: Control; T=24, 48, 72, 96, 120 hours, vertical bars left to right).

TABLE 3
B. megaterium were grown in TSB broth
and absorbances were measured at 600 nm.

| BPA | Mean (n = 3) ± |
|---|---|
| (mg/L) | SEM |
| 5 | 1.61 ± 0.03 |
| 10 | 1.55 ± 0.02 |
| 20 | 1.26 ± 0.04 |
| 50 | 1.17 ± 0.02 |
| 100 | 0.01 ± 0.00 |

Renuspore does not have the Ability to Degrade BPA that is Present in the Environment: Renuspore does not Utilize or Degrade DEET (N, N-Diethyl-m-Toluamide):

[0151] No genes for DEET hydrolase were detected in Renuspore genome. Renuspore is unable to utilize DEET as an energy source using minimal media. Also, increasing the concentration of this synthetic chemical in nutrient rich media has a toxic effect on the growth of Renuspore (Table 4, 5 & 6). Thus, Renuspore cannot use DEET as a food source and cannot break it down into less toxic products.

TABLE 4
CFU/ml of Renuspore in TSB supplemented with DEET at T24.
Renuspore CFU/ml in TSB broth

| Concentration | CFU/ml Mean (n = 2) ± |
|---|---|
| (ppm) | standard error |
| 5 | 4750 ± 353.55 |
| 25 | 2600 ± 848.52 |
| 50 | 600 ± 565.68 |
| 100 | 0 |

TABLE 5
Cell growth of Renuspore (OD600) in mineral salts
medium (MM) supplemented with DEET at T24
Renuspore OD_{600 nm} in MM broth

| Concentration | Mean (n = 3) ± |
|---|---|
| (ppm) | standard error |
| 0.05 | 0.047 ± 0 |
| 0.5 | 0.046 ± 0 |
| 5 | 0.047 ± 0 |
| 25 | 0.047 ± 0 |
| 50 | 0.048 ± 0 |
| 100 | 0.049 ± 0 |

TABLE 6
Cell growth of Renuspore (OD600) in
TSB supplemented with DEET at T24
Renuspore OD_{600 nm} in TSB broth

| Concentration | Mean (n = 3) ± |
|---|---|
| (ppm) | standard error |
| 5 | 0.057 ± 0 |
| 25 | 0.057 ± 0 |
| 50 | 0.058 ± 0 |
| 100 | 0.054 ± 0 |

[0152] Renuspore does not have the ability to degrade DEET that is present in the environment.

Renuspore can Detoxify Nitrite from the Environment:

[0153] Renuspore was grown in TSB media in the presence of nitrite and their supernatants were assayed. TSB media+nitrite was set as control. Renuspore completely removed nitrite from the environment and started to convert it to nitrate or nitric oxide (FIG. 13). Renuspore could reduce nitrite to nitric oxide using a nitrite reductase or oxidize nitrite to nitrate with an oxidoreductase-both enzymes were found in its genome.

[0154] FIG. 13 shows nitrite concentration in the extracellular matrix of Renuspore. Results show average concentration of nitrite in nmole/ml (n=3)±standard error. Significant reduction observed between control and Renuspore is indicated: ****p<0.0001.

[0155] Renuspore can remove environmental nitrite and can play a significant role in reducing the toxic levels of nitrites in the human body.

[0156] Altogether, Renuspore can act as a potential probiotic for bio-removal of the toxic nitrites, oxidizing them to less harmful products like nitrate.

Renuspore does not Biodegrade Ammonia:

[0157] Minimal salt media that contains ammonium chloride as a sole nitrogen source was used to evaluate if Renuspore is capable of using ammonia as a nitrogen source. In the presence of glucose, magnesium sulphate and calcium chloride, Renuspore was able to grow in minimal media and thereby using 30% of ammonia from the medium (FIG. 14A). In TSB media, Renuspore is capable of synthesizing ammonia, probably from the peptide sources present in the TSB media as there is a 47.9% increase in the concentration of ammonia observed in comparison to the control (FIG. 14B).

[0158] FIG. 14A shows degradation of ammonia by Renuspore. Results show average concentration of ammonia in μmol/L (n=3)±standard error and Tukey's multiple comparison test. Note: symbol ** indicating significance between Renuspore and control (P<0.05).

[0159] FIG. 14B shows the concentration of Ammonia remaining in TSB+1 mM Ammonia following incubation with Renuspore Vs Control, at 37° C. for 24 hours. Note: symbol **; indicating significance between Renuspore and control (P<0.05).

[0160] Renuspore can utilise ammonia as a nutrient source.

### Renuspore Adheres to Epithelial Intestinal Cells:

[0161] FIG. 15 shows adherence of B. megaterium MIT411 spores and vegetative cells to HT-29 and HT-29 MTX cells at 37° C.

[0162] B. megaterium MIT411 vegetative cells do not adhere to HT-29 and HT-29-MTX intestinal cell line. B. megaterium MIT411 spores adhere to the HT-29 and mucus-producing HT-29-MTX cell lines; therefore, it can attach to intestinal cells and germinate to vegetative cells.

[0163] Vegetative cells can bioaccumulate toxic environmental contaminants and eliminate them from the human body without attaching to the gut.

### Renuspore Displays High Protease Activity:

[0164] Renuspore exhibited caseolytic activity on Skim milk agar plates (see FIG. 16). Quantitative analysis of Renuspore caseolytic activity was evaluated by using a commercial kit employing fluorescently tagged casein derivatives. Renuspore demonstrated extracellular protease activity. Genomic analysis of Renuspore reveals the presence multiple genes encoding caseolytic protease CEP (prtP) which explains this high protease activity of Renuspore.

[0165] FIG. 16 shows caseolytic activity of Bacillus megaterium MIT411 (Positive) versus B. coagulans (negative), detected by conventional method with skim milk agar medium at 24 hours. Clearing zones give an indication of the extent of casein degradation. The plate on the left shows streak plates and the plate on the right shows an inoculation from MIT411 strain overnight in TSB.

[0166] FIG. 17 shows Renuspore showed protease activity using quantitative extracellular protease analysis using EnzCheck Kit.

[0167] Both in silico and in vitro analysis suggest the ability of Renuspore to hydrolyze milk proteins specifically casein.

### Renuspore has a Diverse Carbohydrate Profile: Renuspore Metabolizes a Range of Monosaccharides, Sugar Alcohols, Amine Sugars and Glycosides:

[0168] Renuspore was positive for 11 carbohydrates out of the 49 tested using commercial API 50 CH. The majority of these carbohydrates were simple sugars such as D-Ribose, L-Arabinose, D-Xylose, D-Glucose, D-Fructose, and D-Saccharose. Genomic analysis of Renuspore reveals the presence of transporters and enzymes involved in the metabolism of the majority of these sugars. Additionally, genes involved in the metabolism of polysaccharide, Amylase A involved in starch metabolism have also been identified in the genome of Renuspore.

TABLE 7
List of Carbohydrates that are effectively fermented
by B. megaterium MIT411 using API 50 Ch strips.

| | |
|---|---|
| 1 | I-ARABINOSE |
| 2 | D-RIBOSE |
| 3 | D-XYLOSE |
| 4 | D-GLUCOSE |
| 5 | D-FRUCTOSE |
| 6 | D-MANNITOL |
| 7 | D-SORBITOL |
| 8 | N-ACETYLGLUCOSAMINE |
| 9 | ESCULIN FERRIC CITRATE |
| 10 | D-MALTOSE |
| 11 | D-SACCHAROSE |

[0169] Both in silico and in vitro analysis suggests the diverse ability of Renuspore to ferment a range of carbohydrates.

### Renuspore has Enzymatic Activity Against Esters, Proteins and Carbohydrates:

[0170] Renuspore was positive for esterase, α-chymotrypsin, alkaline phosphatase (ALP), and galactosidase activity using API ZYM kit which implies:
[0171] a high possibility of Renuspore to generate free fatty acids from the action of esterase in the presence of an appropriate lipid source.
[0172] α-chymotrypsin activity of Renuspore, ability to hydrolyze amid bonds in which the amino acid N-terminal to the bond is a tryptophan, tyrosine, phenylalanine, or leucine, and this activity should add to the proteolytic capability of Renuspore.
[0173] Galactosidase adds to the carbohydrate catabolismpotential of Renuspore as these are active against various oligosaccharides, lactosylceramides, lactose, and numerous glycoproteins.

[0174] Indeed, in silico analysis have identified genes encoding Esterases, ALP, Proteases and Galactosidases.

TABLE 8
Enzymatic profile of Renuspore using API ZYM kit.

| | | B. megaterium |
|---|---|---|
| | | MIT411 |
| Esterase activity | Esterase (C4:0) | + |
| | Esterase (C8:0) | + |
| Lipase activity | Lipase (C14:0) | − |
| Peptidase activity | Leucine arylamidase | − |
| | Valine arylamidase | − |
| | Cystine arylamidase | − |
| Proteinase activity | Trypsin | − |
| | α-hymotrypsin | + |
| Phosphatase activity | Acid phosphatase | − |
| | Alkaline phosphatase | + |
| | Phosphohydrolyase | + |
| Glycosidase activity | α- Galactosidase | + |
| | β-Galactosidase | + |
| | β-Glucuronidase | − |
| | α-Glucosidase | − |
| | β-Glucosidase | − |
| | β-Glucosaminidase | − |
| | α-Mannosidase | − |
| | α-Fucosidase | − |

[0175] This study confirms the hydrolytic abilities of Renuspore towards proteins, oligosaccharides and indicates the potential to break down fats.

[0176] These data suggest that Renuspore could help digest these molecules in the gut.

Renuspore Generates Diverse Range of Amino Acids from Milk Protein Hydrolysis:

[0177] UHT Milk model was used to analyse the proteolytic abilities of Renuspore. In silico analysis of Renuspore revealed presence of a range of proteases, peptide transporters and peptidases, indicating a presence of a strong proteolytic system in Renuspore. GC-MS analysis identified a total of 38 Free Amino Acids (FAA) compounds, of which 28 were found to be statistically significant in Renuspore. The results from this analysis confirm the presence of a highly active proteolytic system in Renuspore that can completely degrade milk proteins to release FAA. Additionally, the proteolytic system in Renuspore shows the potential to further catabolise these amino acids to generate aromatic carboxylic acids (4-methyl-2-oxopentanoic acid, benzoic acid, octapentanoic and proponoic acids).

TABLE 9
Statistically significant compounds analysed with GC-MS using
the FAA method are listed along with potential precursors.

| Compound | Putative peptidases/precursors |
|---|---|
| Alanine | Aminopeptidase (PepN or other |
| | cystein specific aminopeptidases) |
| Valine | Aminopeptidase (PepN or other |
| | cystein specific aminopeptidases) |
| Leucine | Leucine aminopeptidases/ |
| | PepA/PepN/aminopeptidases |
| Isoleucine | Aminopeptidase |
| Threonine | Aminopeptidase |
| Proline | PepP/PepX |
| Aspartic acid | PepE |
| Methionine | PepM/MAP |
| Phenylalanine | Leucine aminopeptidase |
| Lysine | PepN/Aminopeptidase |
| Tyrosine | Aminopeptidase |
| Tryptophan | Aminopeptidase |
| Crystine | PCP |
| Ornithine | Arginine |
| Serine | Serine peptidases |
| Pyruvic acid | Glucose/alanine |
| Fumaric acid | Maleic acid or cis-butenedioic acid |
| Succinic acid | Lactose/glucose |
| 2-phosphoenolpyruvic acid | Lactose/glucose |
| 2-methyl-2-oxopentanoic acid | Leucine |
| 3-(methylthio)propionic acid | Alanine |
| 3-Methyl-oxirane-2-carboxylic | Amino acid decarboxylation |
| acid | |
| Benzoic acid | Phenylalanine |
| Phenylacetic acid | L-phenylalanine + glucose |
| N-acetyl-valine | Valine |

[0178] Both in silico and in vitro analysis suggests that Renuspore has a strong and active proteolytic system as a high release of amino acids and their downstream products were obtained in Renuspore fermented UHT milk.

Renuspore Generates Diverse Range of Amino Acids from Milk Protein Hydrolysis: Renuspore FAA Analysis Presented in Bar Graphs (Mean+SEM):

[0179] FIG. 18 shows FAA increased in Renuspore UHT fermented milk samples. Statistical analysis performed using Multiple T test-using unpaired parametric, Two-stage step-up (Benjamini, Krieger, and Yekutieli and P-value≤0.01=*. The white bars represent the control.

[0180] FIG. 19 shows FAA increased in Renuspore UHT fermented milk samples. Statistical analysis performed using Multiple T test-using unpaired parametric, Two-stage step-up (Benjamini, Krieger, and Yekutieli and P-value≤0.01=*. The white bars represent the control.

[0181] FIG. 20 shows FAA increased in Renuspore UHT fermented milk samples. Statistical analysis performed using Multiple T test-using unpaired parametric, Two-stage step-up (Benjamini, Krieger, and Yekutieli and P-value≤0.01=*. The white bars represent the control.

[0182] FIG. 21 shows FAA increased in Renuspore UHT fermented milk samples. Statistical analysis performed using Multiple T test-using unpaired parametric, Two-stage step-up (Benjamini, Krieger, and Yekutieli and P-value≤0.01=*. The white bars represent the control.

### Renuspore Displays Weak Lipolytic Activity: Limited Short Chain Fatty Acids (SCFA) Produced by Renuspore Fermentation of UHT Milk:

[0183] Although Renuspore has displayed estereolytic activity and has genes encoding esterase A and lipases, only two SCFA were significantly increased in Renuspore fermented UHT milk samples.

[0184] FIG. 22 shows SCFA increased in Renuspore UHT fermented milk samples. Statistical analysis performed using Multiple T test-using unpaired parametric, Two-stage step-up (Benjamini, Krieger, and Yekutieli and P-value≤0.01=*. The white bar represents the control.

[0185] The only 2 SCFA associated with Renuspore were; Propionate and 2-methyl-propionate and these are usually associated with amino acid metabolism specifically alanine and valine, respectively. Altogether, these data suggest narrow lipolytic activity of Renuspore.

Renuspore Proteomics Analysis Identifies Proteins with Potential Probiotic Benefits: Proteomic Study—Renuspore Secretome:

[0186] Extracellular secretions of Renuspore grown in TSB broth for 24 h were sent to mass spectrometry to identify proteins released by the probiotic strain. A total of 23 proteins were detected, of which 4 had potential probiotic benefits (Table 9A):

TABLE 9A

| Proteins of interest | Potential roles |
|---|---|
| Arginase | Involved in urea cycle increasing |
| | detoxification of ammonia |
| Metal-dependent hydrolase | Involved in digestion or proteins and |
| | carbohydrates |
| Thiol peroxidase | Involved in reduction of hydrogen |
| | peroxide - antioxidant |
| LysM peptidoglycan-binding | Potential antimicrobial properties |
| domain-containing protein | |

[0187] These data confirm previous in vitro results showing how Renuspore can help in digestion of proteins and carbohydrates, can detoxify detrimental compounds and has antimicrobial properties against pathogens.

### Renuspore in the Presence of Fibersol® (F) in Minimal Media:

[0188] FIG. 23 shows Fibersol® did not significantly increase the concentration (CFU/mL) of Renuspore in minimal media 24 hours post incubation compared to controls.

### Renuspore Immunomodulation Capacity in In Vitro Human Macrophage Model:

[0189] FIGS. 24 and 25 show that Renuspore increased the expression of cytokines in a human macrophage cell culture model. Unlike LPS positive control, Renuspore increased the expression of all cytokines tested (TNF-α, IL-1β, IL-18, IL-6, GM-CSF, IL-10, IL-1RA and EGF). Renuspore was more effective than LPS at inducing expression of TNF-α, GM-CSF and EGF. Therefore, Renuspore can be considered a strong stimulator of the innate immune system. *p<0.05, **p<0.01, ***p<0.001, ****p<0.0001 Significantly higher than negative control; ⁺p<0.05, ⁺⁺p<0.01, ⁺⁺⁺⁺p<0.0001, significantly higher than positive control.

Renuspore Antioxidant Capacity in H₂O₂ Oxidative Stress C. elegans Model:

[0190] FIG. 26 shows that Renuspore did not increase C. elegans survival after exposure to H₂O₂. Vitamin C was used as positive control for the assay. *p<0.05 significantly higher than control.

### Example 2

### Assess Adhesion Ability to an In Vitro Model of Intestinal Epithelium

[0191] Cell lines: Human Colorectal Adenocarcinoma Cell Line HT-29 and mucous-secreting cell line HT-29-MTX were propagated using low glucose DMEM medium supplemented with 10% Fetal Bovine Serum, 2 mM glutamine, 100 U/ml penicillin, 100 μg/ml streptomycin, and 2 μg/ml amphotericin B in a 5% CO₂ atmosphere at 37° C.

[0192] Cells were seeded onto 24-well plates at a density 5×10⁵ cell/well and cultured for 21-28 days to complete maturation. Media was replaced every 2-3 days.

[0193] Prior to experiments cells were washed twice with 0.5 ml DPBS. DPBS was completely aspirated from the wells after the second round of washing.

[0194] Preparation of spores: Ten milligrams of B. clausii CSI08, B. megaterium MIT411 and B. coagulans CGI314 spores powders were weighted in 15 ml falcon tubes and resuspended in 10 ml of full culture medium without antibiotics. Suspensions were aliquoted and stored at −20° C. until use. Suspensions were used within 2 weeks upon preparation.

[0195] Adhesion assay: 500 μl of spores suspensions (1.3×10⁷-9.2×10⁷ CFU/ml) were added to HT-29 and HT-29-MTX cells, mixed by a gentle swirl, and incubated for 2.5 h at 37° C. in the CO₂ incubator. Control wells not containing mammalian cells were prepared and incubated in parallel in the same way (0.5 ml of spores' suspensions).

[0196] Upon incubation HT-29 and HT-29-MTX cells were washed 4 times with 0.5 ml PBS. After that 50 μl of Trypsin/EDTA solution and 50 μl of PBS were added to the wells and incubated for 10 min with gentle shaking (˜100 rpm) at 37° C. Fifty microliters of Trypsin/EDTA solution were added to control wells.

[0197] Consequently, 450 μl of PBS were added to the wells with spores, contents of the wells were transferred into Eppendorf tubes with scrapping and subjected to three rounds of vigorous shaking 30 sec each. Contents of control wells were transferred into Eppendorf tubes and subjected to one round of shaking.

[0198] Serial dilutions (plus dilutions of control wells) were prepared in PBS and plated onto BC agar (B. coagulans CGI314) or PetriFilm™ (B. clausii CSI08, B. megaterium MIT411). Plates were incubated at 37° C. for 48 h prior to counting, PetriFilm were incubated at 37° C. for 24 h prior to counting.

[0199] Experiments were performed two or three times with three technical replicates per experiment. The results are expressed as means±SEM.

[0200] FIG. 27 shows the adhesion ability of Bacillus megaterium MIT411 vegetative cells and spores in intestinal epithelial cell lines HT-29 and HT-29-MTX at 37° C. (DI_EK_03). See FIG. 27 showing (left graph) percentage of adhered bacteria on HT-29 with B. megaterium MIT411 spores (left bar) and vegetative B. megaterium MIT411 (right bar). See also FIG. 27 showing (right graph) percentage of adhered bacteria on HT-29-MTX with B. megaterium MIT411 spores (left bar) and vegetative B. megaterium MIT411 (right bar).

[0201] In a comparative study, adherence of B. clausii CSI08, B. megaterium MIT411 and B. coagulans CGI314 spores to the HT-29-MTX cell line were as follows (Table D):

TABLE D

| Percentage of | | | |
|---|---|---|---|
| adherence to HT-29- | B. clausii | B. megaterium | B. coagulans |
| MTX cell line | CSI08 | MIT411 | CGI314 |
| Mean | 12.10 | 20.68 | 19.68 |
| Standard error of | 0.7710 | 3.005 | 2.197 |
| the mean | | | |

[0202] Adherence of B. clausii CSI08, B. megaterium MIT411 and B. coagulans CGI314 spores to the HT-29 cell line (Table E):

TABLE E

| Percentage of | | | |
|---|---|---|---|
| adherence to HT-29 | B. clausii | B. megaterium | B. coagulans |
| cell line | CSI08 | MIT411 | CGI314 |
| Mean | 0.2578 | 1.499 | 0.8033 |
| Standard error of | 0.02035 | 0.2983 | 0.1781 |
| the mean | | | |

### Conclusion

[0203] 1. Results set out above demonstrate higher ability of spores to adhere to the mucous-secreting cell line HT-29-MTX compared to non-mucus secreting cells, possibly due to spores' physical properties.
[0204] 2. B. megaterium MIT411 and B. coagulans CGI314 spores have higher (but overall low) ability to adhere to non-mucus producing cell line HT-29 compared to B. clausii CSI08 spores.

### Example 3

Evaluation of Bacillus clausii CSI08, Bacillus megaterium MIT411 and a Bacillus Cocktail on Safety, Tolerance and Gastrointestinal Health: A Randomised, Double-Blind, Placebo-Controlled Trial in Healthy Adults

[0205] The safety, tolerance and impact of 1×10⁹ CFU Bacillus clausii CSI08, 1×10⁹ CFU Bacillus megaterium MIT411 and a probiotic cocktail containing 0.5×10⁹ CFU of Bacillus subitilis DE111®, 0.5×10⁹ CFU of Bacillus megaterium MIT411, 0.5×10⁹ CFU Bacillus coagulans CGI314, 0.5×10⁹ CFU Bacillus clausii CSI08 (i.e., Bacillus subtilis DE111®, Bacillus megaterium MIT411, Bacillus coagulans CGI314, and Bacillus clausii CSI08 with a total count of 2.0×10⁹ CFU) administered daily were assessed as compared with a maltodextrin containing placebo control. A total of 98 study participants received daily doses for 45 days, followed by a washout period of 2 weeks. A questionnaire to capture the incidence and duration of upper respiratory tract, urinary tract and/or gastrointestinal complaints and a diary to capture stool regularity and consistency was kept daily to record compliance throughout the 45 days. Faecal and blood samples were collected for microbiological and haematological analysis at the start and end of the treatment period. The probiotic cocktail significantly decreased the incidence of loose stools throughout the entire study. The recorded respiratory, urinary and gastrointestinal symptoms, defecation frequency and other stool consistency were not influenced. No clinically relevant changes in blood parameters such as liver and kidney function and no serious adverse events appeared during and after administration. There were no changes in symptoms including sadness, irritability, energy, appetite, tension, stress, sleep, cardiovascular events, aches and pains, and dizziness as determined by a mood questionnaire administered to participants at baseline and at the end of the treatment period. Similarly, the measured inflammatory cytokines, antioxidant levels, cholesterol, triglycerides, free amino acids or minerals remained unaffected. There were no negative changes in alpha or beta diversity of the microbiota with any of the treatment groups. These promising data suggest that these treatments were safe and well tolerated, and further work with larger cohorts are justified to determine the efficacy of these potential probiotics in select demographic groups.

[0206] Probiotics are live microorganisms residing in the human gut with low or no pathogenicity and exhibit beneficial effects for the host. Common products containing probiotic bacteria include dietary supplements and foodstuffs such as fermented dairy products, sauerkraut, and salami. Probiotic supplementation has shown positive results for relief of various ailments such as: antibiotic associated diarrhea, constipation, allergies, and diabetes. Probiotics have also exhibited protective properties.

[0207] Probiotic supplements can contain one or more different bacterial strains that exert different effects on the human gut. Common probiotic strains are lactic acid producers such as Lactobacillus, Bifidobacterium, and Streptococcus due to their resistance to gastric acids, bile salts, and pancreatic enzymes. Studies have shown that lactic acid bacteria are effective inhibitors of pathogenic, gram-negative, bacterial colonization (e.g. Salmonella typhimurium, Clostridium difficile, and Escherichia coli) in vitro.

[0208] Not all probiotic supplements are lactic acid producers however. Bacillus subtilis spores have been used as probiotics, competitive exclusion agents, and prophylactics for human and animal consumption. All four Bacilli strains are gram-positive, spore forming, rod-shaped bacterium. Under nutrient limiting conditions, Bacillus sp. can form resistant dormant endospores to environmental stressors and nutrient deprivation, making these bacteria a viable option for a probiotic supplement.

[0209] DE111, CSI08, CGI314, and MIT411 are unique strain of probiotics. As Bacillus strains of probiotics, they are able to resist the harsh digestive environment and colonise the gut, thus supporting a healthy GI tract. To date, DE111 is sold in both the USA and Canada as a probiotic food ingredient and as a probiotic capsule for adults. The other three Bacillus probiotics CSI08, CGI314, and MIT411 used in this trial are not currently on the market and are claimed herein.

[0210] This trial was to determine the safety of 3 new probiotic strains and to assess their efficacy in reducing the incidence and/or duration of gastrointestinal problems and infections as well as respiratory infections in healthy adults.

### Materials and Methods

### Subjects

[0211] Healthy adult volunteers, 18-65 years of age, were recruited using flyers, posters and from their physicians from February to July 2021. Inclusion criteria included: willingness to provide informed consent and being in good overall health. Exclusion criteria included: existence of any pre-existing adverse event conditions (e.g. gastric ulcer, Crohn's disease, UC, diabetes, kidney disease, HIV/AIDS, hepatitis, cancer, and organ transplant recipient), taking medications for digestive complaints (constipation, bloating or diarrhoea), antibiotic usage within the past four weeks prior to randomisation, unwillingness to discontinue any probiotic supplement other than that provided by the study, known immunodeficiency or use of immunosuppressive medication, pregnancy, 6 month post-partum or breastfeeding, women of childbearing age planning on pregnancy during the course of the study, participation in another study and use of medication for mood (e.g. antidepressants, anxiolytics, antipsychotics).

[0212] This study was approved by the University of Ljubljana, Biotechnical Faculty, Nutritional Research Ethics Committee in Slovenia and conducted according to guidelines established by the Declaration of Helsinki. All participants were informed of the aims, requirements and risks of the study in addition to being notified that they could withdraw from the study at any time. Participants provided their written consent indicating their full knowledge of the study protocol.

### Experimental Design

[0213] This study was a double-blinded, placebo-controlled, randomized, parallel trial. The study took place through University Clinical Centre Maribor, Slovenia and was co-ordinated by the CRO Vizera d.o.o., Slovenia. Participants were randomised to either one of three treatment groups or placebo administered daily. Treatment groups were 1×10⁹ CFU/dose of Bacillus clausii CSI08, 1×10⁹ CFU/dose of Bacillus megaterium MIT411, and a probiotic cocktail containing Bacillus subtilis DE111®, Bacillus megaterium MIT411, Bacillus coagulans CGI314, and Bacillus clausii CSI08 with a total count of 2.0×10⁹ CFU/dose administered daily. Placebo was rice maltodextrin.

[0214] A randomisation scheme was performed by CRO Vizera d.o.o., Slovenia with the allocation sequence being concealed from study personnel and participants until randomisation day in sealed, opaque envelopes. After assessment of baseline characteristics (age, sex, height, weight by digital scale) and collection of an initial stool sample, an envelope was unsealed and participants were assigned to an intervention. Investigators received individually closed envelopes containing the link between the randomization number and the treatment group for a specific participant. The sealed envelopes could only be opened in case of emergency. The Sponsor was immediately notified if a participant's treatment was unblinded during the course of the study. Information regarding the un-blinding had to be recorded in the data source document and in the Case Report Form (CRF) of the participant. Participants were then instructed to consume one capsule per day at the end of a meal.

[0215] Participants visited the study centre 3 times, and performed 2 calls with the designated Investigator: Visit 0 for screening purposes (Screening Visit), 2 times during treatment period with Visit 1 being baseline visit, where randomization and distribution of product were performed, and Visit 2 being the End of Treatment Visit. Additionally, the patients performed a phone call with Investigator after 21 days of product consumption (In between visits call) and after 2 weeks of follow up following Visit 2 (Follow-up call). A graphical flow chart of the study is presented in FIG. 28.

[0216] After screening, consent and randomization, participants provided blood and stool samples prior to any treatment. At the end of the 45 day intervention period, study participants provided a second stool sample and again provided blood samples.

[0217] FIG. 28 shows a graphical flow chart of the study design.

### Probiotic Administration Protocol

[0218] Deerland Probiotics and Enzymes (Kennesaw, Georgia, US) provided investigational products as identical, oblong 300 mg capsules and placebo was indistinguishable by appearance. The study capsules were provided in bottles labelled with a treatment code by a study collaborator who did not have contact with study personnel or participants.

### Study Protocol

[0219] Participants completed the questionnaire daily to monitor time of defaecation and type of stool samples based on the Bristol stool chart index and if there were any symptoms including: gastrointestinal distress, respiratory distress, urinary tract symptoms, cephalic, ear-nose-throat, behavioural, emetic, loss of appetite, fever and epidermal. If any visits to their GP or any medication was prescribed during the trial this was also captured and reported. A mood questionnaire was administered to participants at baseline and at the end of the treatment period to assess their experience over the previous month. This questionnaire consisted of 14 captured symptoms including sadness, irritability, energy, appetite, tension, stress, sleep, cardiovascular events, aches and pains and dizziness on a scale of 1 (no noticeable symptoms) to 3 (severe). Any adverse events were reported to study staff.

### Blood Samples Collection and Preparation

[0220] For safety bloods, a 3-mL red cap serum clot activator tube was used (Greiner Bio-One, 454029) for blood collection. For biochemistry blood panel high- and low-density lipoproteins, total cholesterol and triglyceride determination, 3.5 mL SST II Advanced/gel yellow cap vials (Greiner Bio-One, 454029) were used. For antioxidants and cytokine determination, whole blood was collected into 4-mL lithium-heparin containing tubes (Greiner Bio-One, 454029). Plasma samples were prepared by centrifugation at 2000 G for 15 min. The supernatant was aliquoted and stored at −80° C. for later analysis.

### LDL, HDL, Total Cholesterol and Triglyceride Determination

[0221] Hematology and Biochemistry assessment were run in University Clinical Centre Maribor, Slovenia. Safety bloods were run with a Sysmex EN-1000, while Biochemical assays for LDL, HDL, total cholesterol and triglyceride were assayed according to manufacturer's instructions and analysed with an Abbott Allinity C.

### Cytokine Quantification

[0222] The concentrations of IL-8 and TNF-alpha in serum samples were determined by sandwich ELISAs: Human IL-8 (CXCL8) ELISA Kit (ELH-IL8-1, RayBiotech) and Human TNF alpha ELISA Kit (ELH-TNFa-1, RayBiotech) according to the manufacturer's instruction. Prior to ELISAs serum samples were diluted 1:2 using dilution buffers supplied with the kits.

### Antioxidant Activity Determination

[0223] Total antioxidant activity was assessed using the total antioxidant capacity assay kit (Sigma, Ireland) according to manufacturer's instructions and the absorbance was measured at 340 nm.

### Stool Collection

[0224] Stools were collected at the baseline visit prior to treatment and again at the final visit on day 45 using Zymokit DNA/RNA Shield™ Fecal Collection Tube (ZymoResearch, California, US). Participants were instructed to place the collection systems containing the samples on ice immediately after defecation and to deliver samples to study personnel on clinic visits.

DNA Extraction and 16S rRNA Sequencing

[0225] Total fecal DNA from approximately 200 mg sample was extracted using ZymoBIOMICS DNA Miniprep Kit (Zymo Research, Irvine, CA, USA) in accordance with manufacturer's instructions. Briefly, the stool samples were placed in the ZR BashingBead™ Lysis tubes containing 750 μl ZymoBIOMICS™ Lysis Solution and processed in a BeadBug™ 6 homogenizer (Benchmark Scientific, China): 5×1 min beating at 4350 rpm with 1 min intermittent step between beating cycles. After that, the lysis tubes were centrifuged at 10,000 g for 1 minute. Four hundred microliters of supernatants were transferred to the Zymo-Spin™ III-F Filters in collection tubes and further centrifuged at 8,000 g for 1 minute. The filtrates were mixed with 1,200 μl of ZymoBIOMICS™ DNA Binding Buffer, transferred to Zymo-Spin™ IICR Columns in Collection Tubes and centrifuged at 10,000 g for 1 minute. After three rounds of washing, DNA was eluted in 100 μl of ZymoBIOMICS™ DNase/RNase Free water and further purified using Zymo-Spin™ III-HRC Filters according to the protocol. DNA concentration was determined using Qubit dsDNA BR Assay kit (ThermoFisher Scientific).

### Data Generation

[0226] Library preparation was performed following the Illumina guidelines for 16S Metagenomic Sequencing Library Preparation (https://support.illumina.com/documents/documentation/chemistry_documentation/16s/16s-metagenomic-library-prep-guide-15044223-b.pdf). Briefly, 16S degenerated primers are used to amplify the target from each sample. At the same time Illumina adapters and barcodes are included to allow the creation of the library. Sequencing was performed on a Novaseq 6000 machine producing paired-end 250 bp reads. A quality control of the sequencing data was performed with the software QIIME2. On average, 670 thousand read pairs were produced per sample. Taxonomic classification of the ASVs (also referred to as OTUs) was performed using QIIME2/DADA2 and the Silva132 database.

### Statistical Analyses

[0227] 25 participants per arm was determined to be sufficient to assess the occurrence and nature of possible adverse events including incidence and duration of urinary tract, gastrointestinal, and upper respiratory complaints. Descriptive statistics was used to evaluate these outcomes in this study. Kruskal-Wallis test was used to confirm there was no statistically significant difference in the occurrence of any of these individual symptoms among the four treatment groups at the beginning of the study, or in the incidence and duration of gastrointestinal, upper respiratory or urinary tract complaints over the duration of the study. Furthermore, nonparametric Mann-Whitney U test with Holm's correction was used for pairwise comparison between each of the three probiotic product groups compared to placebo group.

[0228] For the gastrointestinal health questionnaire and blood analyses the difference in individual symptoms score change from baseline to the end of the treatment period was compared among the treatment groups using the Analysis of variance (one-way ANOVA test) with post hoc test evaluating pairwise comparison between each of the three treatment groups as compared to placebo group.

[0229] For sequencing data, multiple alpha diversity indices were calculated including Observed, Chao1, ACE, Shannon and Simpson index. The alpha diversity was then compared among the experimental groups and against the Placebo in order to detect differences due to the treatments—or within treatments from baseline to the post-treatment timepoint.

[0230] With the aim of quantifying compositional dissimilarity between different samples, the Bray-Curtis dissimilarity index was calculated and used for the creation of multiple clustering plots. This method collapses information from multiple dimensions for ease of visualisation and interpretation. A paired Wilcoxon test was used to compare the distribution of the groups.

[0231] Differential abundance analyses were carried out to detect significant differences in genera abundance across the different treatments and time points. Day 1 samples from all treatments were compared against the Day 1 Placebo group to determine if there were any resting difference at baseline. For each group, the pairwise comparison Day 45 vs Day 1 was performed. Bifactorial analyses was also performed using the Placebo group as reference to detect if there is a significant difference in the response of the treatments at Day 45 with respect to Day 1 compared to the response of the Placebo group at Day 45 with respect to Day 1.

### Results

### Participants

[0232] Ninety-eight participants completed the 45 day intervention (FIG. 28). After screening, one participant declined to participate, and another was withdrawn as they became pregnant. A total of 12 adverse events were reported in the study. These included gastroesophageal reflux (3 AEs), rash (2 AEs), and vertigo (2 AEs). One case of rash was reported as a fungal rash (Tinea corporis) and one case of vertigo was attributed to the use of approved co-medication. All other reported AEs occurred only once, namely: vaginal inflammation, stool parasite (possibly related to a trip overseas), right wrist spin, metallic taste, lower back pain, inflammation of sebaceous gland, granuloma, dark brown coloured stool, and acne.

[0233] Causality assessment revealed no relation between the reported AEs and the study products.

[0234] No serious adverse events were reported throughout the study.

### Participant Demographics:

TABLE 10
Participant demographics for the study

| | | | | | | | Probiotic | |
|---|---|---|---|---|---|---|---|---|
| | Placebo | | B. clausii | | B. megaterium | | cocktail | |
| | N = 24 | | N = 24 | | N = 25 | | N = 25 | |
| Male (%) | 7 | (29.2) | 9 | (37.5) | 7 | (28) | 7 | (28) |
| Female (%) | 17 | (70.8) | 15 | (62.5) | 18 | (72) | 18 | (72) |
| Mean Age (SD) | 40.5 | (12.3) | 37.3 | (12.7) | 40.6 | (9.6) | 35 | (11.6) |
| Age (min-max) | 22-63 | | 19-65 | | 23-58 | | 18-60 | |
| Mean Height (SD) | 172 | (0.1) | 172 | (0.1) | 172 | (0.08) | 171 | (0.09) |
| Height (min-max) | 152-189 | | 158-192 | | 160-186 | | 155-190 | |
| Mean Weight (SD) | 73.9 | (16.2) | 70.7 | (16.1) | 78.1 | (15.8) | 70.2 | (14.7) |

| | | | | |
|---|---|---|---|---|
| Weight (min-max) | 52-112 | 48-106 | 45-120 | 50-101.5 |

### Gastrointestinal Health Status at Screening Visit:

TABLE 11
Gastrointestinal health at baseline (N = 98). (How often
have you had the following problems during last month?)

| | | | | | | | Probiotic | |
|---|---|---|---|---|---|---|---|---|
| | Placebo | | B. clausii | | B. megaterium | | cocktail | |
| | (N* = 24) | | (N* = 24) | | (N* = 25) | | (N* = 25) | |
| Diarrhea (p = 0.499) | 24 | | 24 | | 25 | | 25 | |
| No problems or <1/month (%) | 22 | (91.7) | 24 | (100.0) | 23 | (92.0) | 24 | (96.0) |
| Monthly basis (%) | 2 | (8.3) | 0 | (0.0) | 2 | (8.0) | 1 | (4.0) |
| Weekly basis (%) | 0 | (0.0) | 0 | (0.0) | 0 | (0.0) | 0 | (0.0) |
| Daily basis (%) | 0 | (0.0) | 0 | (0.0) | 0 | (0.0) | 0 | (0.0) |
| Loose stool (p = 0.771) | 24 | | 24 | | 25 | | 25 | |
| No problems or <1/month (%) | 12 | (50.0) | 16 | (66.7) | 16 | (64.0) | 15 | (60.0) |
| Monthly basis (%) | 10 | (41.7) | 6 | (25.0) | 7 | (28.0) | 8 | (32.0) |
| Weekly basis (%) | 1 | (4.2) | 1 | (4.2) | 1 | (4.0) | 0 | (0.0) |
| Daily basis (%) | 1 | (4.2) | 1 | (4.2) | 1 | (4.0) | 2 | (8.0) |
| Constipation (p = 0.625) | 24 | | 24 | | 25 | | 25 | |
| No problems or <1/month (%) | 16 | (66.7) | 18 | (75.0) | 20 | (80.0) | 20 | (80.0) |
| Monthly basis (%) | 6 | (25.0) | 4 | (16.7) | 4 | (16.0) | 3 | (12.0) |
| Weekly basis (%) | 0 | (0.0) | 1 | (4.2) | 1 | (4.0) | 2 | (8.0) |
| Daily basis (%) | 2 | (8.3) | 1 | (4.2) | 0 | (0.0) | 0 | (0.0) |
| Bowel sounds/stomach | 24 | | 24 | | 25 | | 25 | |
| rumble (p = 0.745) | | | | | | | | |
| No problems or <1/month (%) | 13 | (54.2) | 16 | (66.7) | 17 | (68.0) | 18 | (72.0) |
| Monthly basis (%) | 8 | (33.3) | 5 | (20.8) | 5 | (20.0) | 3 | (12.0) |
| Weekly basis (%) | 3 | (12.5) | 2 | (8.3) | 3 | (12.0) | 4 | (16.0) |
| Daily basis (%) | 0 | (0.0) | 1 | (4.2) | 0 | (0.0) | 0 | (0.0) |
| Cramping/stomach pain | 24 | | 24 | | 25 | | 25 | |
| (p = 0.880) | | | | | | | | |
| No problems or <1/month (%) | 18 | (75.0) | 17 | (70.8) | 21 | (84.0) | 18 | (72.0) |
| Monthly basis (%) | 4 | (16.7) | 6 | (25.0) | 2 | (8.0) | 6 | (24.0) |
| Weekly basis (%) | 2 | (8.3) | 0 | (0.0) | 2 | (8.0) | 1 | (4.0) |
| Daily basis (%) | 0 | (0.0) | 1 | (4.2) | 0 | (0.0) | 0 | (0.0) |
| Flatulence (p = 0.153) | 24 | | 24 | | 25 | | 25 | |
| No problems or <1/month (%) | 12 | (50.0) | 9 | (37.5) | 7 | (28.0) | 16 | (64.0) |
| Monthly basis (%) | 6 | (25.0) | 9 | (37.5) | 10 | (40.0) | 5 | (20.0) |
| Weekly basis (%) | 4 | (16.7) | 5 | (20.8) | 3 | (12.0) | 3 | (12.0) |
| Daily basis (%) | 2 | (8.3) | 1 | (4.2) | 5 | (20.0) | 1 | (4.0) |
| Bloating (p = 0.136) | 24 | | 24 | | 25 | | 25 | |
| No problems or <1/month (%) | 12 | (50.0) | 14 | (58.3) | 9 | (36.0) | 15 | (60.0) |
| Monthly basis (%) | 8 | (33.3) | 7 | (29.2) | 9 | (36.0) | 8 | (32.0) |
| Weekly basis (%) | 3 | (12.5) | 3 | (12.5) | 4 | (16.0) | 2 | (8.0) |
| Daily basis (%) | 1 | (4.2) | 0 | (0.0) | 3 | (12.0) | 0 | (0.0) |
| Blood in stool (p = 0.393) | 24 | | 24 | | 25 | | 25 | |
| No (%) | 23 | (95.8) | 23 | (95.8) | 24 | (96.0) | 22 | (88.0) |
| Rarely (%) | 0 | (0.0) | 1 | (4.0) | 2 | (8.0) | 0 | (0.0) |
| Occasionally (%) | 1 | (4.2) | 0 | (0.0) | 0 | (0.0) | 1 | (4.2) |
| Often (%) | 0 | (0.0) | 0 | (0.0) | 1 | (4.0) | 0 | (0.0) |

N* = number of participants included in the ITT population,
*p-value for Kruskal-Wallis test

[0235] There were no significant differences between the groups for any of individual readouts.

### Stool Consistency and Regularity

[0236] Mean bowel movement frequency (regularity) ranged from 0.33 to 2.16 stools/day in the study participants. A variety of period and intervention group comparisons were concluded not equivalent. Bowel movement frequencies were not significantly different when comparing means to placebo treatment group or washout period (Table 12).

TABLE 12
Treatment had no effect on stool regularity over the
duration of the 45 day trial as compared with placebo

| | | | |
|---|---|---|---|
| | | | Probiotic |
| Placebo | B. clausii | B. megaterium | cocktail |
| (N = 24) | (N = 24) | (N = 25) | (N = 25) |

Stools per day (p = 0.834)*

| | | | | |
|---|---|---|---|---|
| mean (SD): | 1.21 (0.41): | 1.2 (0.39): | 1.1 (0.3): | 1.19 (0.45): |
| min-max | 0.36-2.04 | 0.52-2.13 | 0.51-2.04 | 0.33-2.16 |

*p-value for ANOVA test

[0237] Stool consistency is reported as the proportion of participants with loose stool and the proportion of participants with hard stool in the total treatment period. Baseline questionnaire reported no differences in the incidence of loose stool or hard stools/constipation in the study groups as compared to control (Table 2). Participants were asked to report over the last month how often they had loose stools or hard stools/constipation. The scale was as follows 0=never, 1=monthly, 2=weekly, 3=daily.

[0238] FIG. 29 shows the probiotic cocktail significantly decreased the incidence of loose stool over the course of the study as compared to placebo control.

[0239] Over the course of the first 6 weeks of the study, the probiotic cocktail significantly decreased the incidence of loose stools as an overall effect when compared with control (FIG. 29), as determined by repeated measures one way ANOVA (treatment: F_{(2.615, 13.08)}=20.07, P<0.0001; time (F_{(5, 15)}=2.803, p=0.055). Of the study participants, 16 of the 25 in the probiotic group reported no loose stools at all over the course of the study, while there were only 8 in the placebo group, 10 in the B. clausii group, and 10 in the B. megaterium group.

[0240] FIG. 30 shows no effect of any treatments on percentage of hard stools as compared to placebo control.

[0241] There was no significant effect of any of the treatment groups on the percentage of hard stools over the course of the study (FIG. 30) (F_{(1.829, 9.146)}=2.831, P=0.113; time (F_{(5, 15)}=1.121, p=0.391).

### Incidence and Duration of Gastrointestinal Tract Symptoms

TABLE 13
Number of days with symptoms of gastrointestinal distress
reported in Participant diary over the course of the study

| | | | | Probiotic |
|---|---|---|---|---|
| | Placebo | B. clausii | B. megaterium | cocktail |
| | (N* = 24) | (N* = 24) | (N* = 25) | (N* = 25) |
| Loss of appetite | 24 | 24 | 25 | 25 |
| (p* = 0.233) | | | | |
| mean (SD): min-max | 0.1 (0.3): 0-1 | 0.2 (1.0): 0-5 | 0.0 (NC): 0-0 | 0.0 (NC): 0-0 |
| p-value vs placebo | / | 0.589 | 0.434 | 0.434 |
| Diarrhea (p* = 0.888) | 24 | 24 | 25 | 25 |
| mean (SD): min-max | 0.1 (0.3): 0-1 | 0.4 (1.3): 0-6 | 0.1 (0.3): 0-1 | 0.2 (0.6): 0-3 |
| p-value vs placebo | / | 1.000 | 1.000 | 1.000 |
| Constipation (p* = 0.722) | 24 | 24 | 25 | 25 |
| mean (SD): min-max | 0.5 (2.4): 0-12 | 0.3 (1.4): 0-7 | 0.3 (1.4): 0-7 | 0.6 (2.2): 0-8 |
| p-value vs placebo | / | 0.976 | 1.000 | 1.000 |
| Vomiting (p* = 0.713) | 24 | 24 | 25 | 25 |
| mean (SD): min-max | 0.1 (0.3): 0-1 | 0.0 (NC): 0-0 | 0.0 (0.2): 0-1 | 0.0 (0.2): 0-1 |
| p-value vs placebo | / | 0.611 | 1.000 | 1.000 |
| Gases (p* = 0.468) | 24 | 24 | 25 | 25 |
| mean (SD): min-max | 0.6 (1.5): 0-6 | 0.4 (1.1): 0-5 | 0.9 (1.7): 0-6 | 0.2 (0.6): 0-2 |
| p-value vs placebo | / | 0.639 | 1.000 | 1.000 |
| Bowel sounds (p* = 0.809) | 24 | 24 | 25 | 25 |
| mean (SD): min-max | 0.2 (0.6): 0-2 | 0.4 (1.6): 0-8 | 0.1 (0.3): 0-1 | 0.2 (0.7): 0-3 |
| p-value vs placebo | / | 1.000 | 1.000 | 1.000 |
| Cramping/stomach pain | 24 | 24 | 25 | 25 |
| (p* = 0.391) | | | | |
| mean (SD): min-max | 0.5 (1.2): 0-5 | 0.5 (1.3): 0-5 | 0.3 (0.6): 0-2 | 0.1 (0.3): 0-1 |
| p-value vs placebo | / | 0.987 | 1.000 | 1.000 |
| Bloating (p* = 0.543) | 24 | 24 | 25 | 25 |
| mean (SD): min-max | 1.5 (5.1): 0-25 | 0.3 (1.1): 0-5 | 0.3 (0.7): 0-2 | 0.7 (2.1): 0-8 |
| p-value vs placebo | / | 0.558 | 1.000 | 0.963 |

N* = number of participants included in the ITT population, NC = not calculable, p* = p-value for Kruskal-Wallis test, p = p- value for Mann-Whitney U test.

[0242] Kruskal-Wallis test did not show significant differences in the number of days with gastrointestinal infection symptoms among treatment groups. Compared to placebo, none of the study products containing probiotics showed a statistically significant difference in the number of days with gastrointestinal distress symptoms.

### Incidence and Duration of Urinary Tract Symptoms

TABLE 14
Number of days with symptoms of urinary tract
complaints reported in Participant diary

| | | | | Probiotic |
|---|---|---|---|---|
| | Placebo | B. clausii | B. megaterium | cocktail |
| | (N* = 24) | (N* = 24) | (N* = 25) | (N* = 25) |
| Pain burning when | 24 | 24 | 25 | 25 |
| urinating (p* = 0.257) | | | | |
| mean (SD): min-max | 0.2 (0.8): 0-4 | 0.0 (NC): 0-0 | 0.0 (NC): 0-0 | 0.0 (NC): 0-0 |
| p-value vs placebo | / | 0.635 | 1.000 | 1.000 |
| Higher frequency | 24 | 24 | 25 | 25 |
| urinating (p* = 0.744) | | | | |
| mean (SD): min-max | 0.0(NC): 0-0 | 0.0(NC): 0-0 | 0.2 (0.8): 0-4 | 0.1 (0.4): 0-2 |
| p-value vs placebo | / | 1.000 | 0.982 | 0.982 |
| Cramping pressure | 24 | 24 | 25 | 25 |
| lower abdomen or | | | | |
| back (p* = 0.254) | | | | |
| mean (SD): min-max | 0.0(NC): 0-0 | 0.0(NC): 0-0 | 0.2 (0.8): 0-3 | 0.1 (0.4): 0-2 |
| p-value vs placebo | / | 1.000 | 0.646 | 0.982 |

N* = number of participants included in the ITT population, NC = not calculable, p* = p-value for Kruskal-Wallis test, p = p- value for Mann-Whitney U test.

[0243] Kruskal-Wallis test did not show any significant differences in the number of days with urinary tract infection symptoms among treatment groups. Compared to placebo, none of the study products containing probiotics showed a statistically significant difference in the number of days with urinary infection symptoms.

### Incidence and Duration of Upper Respiratory Tract Infection

TABLE 15
Number of days with symptoms of respiratory tract complaints reported in Participant diary

| | | | | Probiotic |
|---|---|---|---|---|
| | Placebo | B. clausii | B. megaterium | cocktail |
| | (N* = 24) | (N* = 24) | (N* = 25) | (N* = 25) |
| Fever (p* = 0.935) | 24 | 24 | 25 | 25 |
| mean (SD): min-max | 0.2 (0.8): 0-4 | 0.3 (1.3): 0-6 | 0.2 (0.7): 0-3 | 0.3 (1.4): 0-7 |
| p-value vs placebo | / | 1.000 | 0.966 | 1.000 |
| Headache (p* = 0.898) | 24 | 24 | 25 | 25 |
| mean (SD): min-max | 1.0 (2.0): 0-7 | 0.9 (1.7): 0-6 | 0.6 (1.0): 0-4 | 0.4 (1.0): 0-4 |
| p-value vs placebo | / | 1.000 | 0.860 | 1.000 |
| Stuffed nose (p* = 0.909) | 24 | 24 | 25 | 25 |
| mean (SD): min-max | 0.3 (1.0): 0-4 | 0.3 (1.1): 0-5 | 0.6 (2.2): 0-10 | 0.4 (2.0): 0-10 |
| p-value vs placebo | / | 1.000 | 0.689 | 1.000 |
| Runny nose (p* = 0.530) | 24 | 24 | 25 | 25 |
| mean (SD): min-max | 0.5 (1.6): 0-6 | 0.4 (1.2): 0-5 | 0.8 (2.1): 0-10 | 0.4 (2.0): 0-10 |
| p-value vs placebo | / | 0.957 | 1.000 | 1.000 |
| Sore throat (p* = 0.142) | 24 | 24 | 25 | 25 |
| mean (SD): min-max | 0.5 (1.1): 0-4 | 0.2 (0.8): 0-4 | 0.4 (0.9): 0-3 | 0.6 (2.1): 0-10 |
| p-value vs placebo | / | 0.539 | 0.870 | 1.000 |
| Dry cough (p* = 0.868) | 24 | 24 | 25 | 25 |
| mean (SD): min-max | 0.6 (1.9): 0-8 | 0.1 (0.3): 0-1 | 0.4 (2.0): 0-10 | 0.1 (0.6): 0-3 |
| p-value vs placebo | / | 1.000 | 0.607 | 1.000 |
| Productive cough (p* = 0.395) | 24 | 24 | 25 | 25 |
| mean (SD): min-max | 0.1 (0.4): 0-2 | 0.0 (NC): 0-0 | 0.4 (2.0): 0-10 | 0.4 (1.6): 0-8 |
| p-value vs placebo | / | 0.459 | 1.000 | 0.983 |
| Sore ear (p* = 0.417) | 24 | 24 | 25 | 25 |
| Mean (SD): min-max | 0.0 (NC): 0-0 | 0.0 (NC): 0-0 | 0.0 (NC): 0-0 | 0.0 (0.2): 0-1 |
| p-value vs placebo | / | 1.000 | 1.000 | 1.000 |

N* = number of participants included in the ITT population, NC = not calculable, p* = p-value for Kruskal-Wallis test, p = p- value for Mann-Whitney U test.

[0244] Kruskal-Wallis test did not show any significant differences in the number of days with respiratory tract infection symptoms among treatment groups. Compared to placebo, none of the study products containing probiotics showed a statistically significant difference in the number of days with symptoms.

### Daily Questionnaire Analysis

[0245] Table 16 summarizes the answers to the Mood questionnaire at baseline and at the end of the study for the 3 treatment groups and the placebo. Mean changes with 95% confidence interval are shown. Results of the ANOVA omnibus test (p*-value) and one-sample T test (p-value) are also presented. Test of normality for the change in scores of the Gut-brain axis show that the data do not follow normal distribution, which could affect the results with borderline significance (p-values between 0.05 and 0.10). This affects two items: Loss of energy and Changes in appetite. An alternative nonparametric Kruskal Wallis test was applied to these items; p-values of 0.111 (Loss of energy) and 0.123 (Changes in appetite) were observed. In general, mean values of the scores were less intense (participants were less bothered by these symptoms) at the end of the treatment period including the placebo group. Consequently, One-sample T-test results show that in one third of tests (of 70 performed) a statistically significant change Gut-brain axis questionnaire score was observed. However, this can be observed for all treatment groups including the placebo group. Consequently, the results of the ANOVA test show, that no significant differences in Gut-brain axis score change among the treatment groups were detected, however a borderline significance for the items Loss of energy and Changes in appetite was observed. The participants in the Bacillus megaterium group experienced the largest change for these two items. Nevertheless, no statistically significant difference for pairwise comparison of probiotic groups with placebo was observed (Table 16 (below)).

TABLE 16
Gut-brain axis questionnaire answers at baseline (N = 98)
and at the end of the study (Post). (How much did the following
emotion or feeling bother you in the last 30 days, including today?)

| | | | | | | Probiotic | |
|---|---|---|---|---|---|---|---|
| Placebo | | B. clausii | | B. megaterium | | cocktail | |
| (N* = 24) | | (N* = 24) | | (N* = 25) | | (N* = 25) | |
| Baseline | Post | Baseline | Post | Baseline | Post | Baseline | Post |

Sadness (p* = 0.264)

| | | | | | | | | |
|---|---|---|---|---|---|---|---|---|
| sum of scores | 12 | 11 | 22 | 13 | 16 | 12 | 16 | 4 |
| No. of participants | 9 | 9 | 14 | 11 | 11 | 8 | 11 | 4 |
| affected | | | | | | | | |

Irritation (p* = 0.341)

| | | | | | | | | |
|---|---|---|---|---|---|---|---|---|
| sum of scores | 21 | 14 | 28 | 20 | 25 | 16 | 28 | 12 |
| No. of participants | 16 | 10 | 19 | 14 | 20 | 12 | 21 | 10 |
| affected | | | | | | | | |

Loss of energy (p* = 0.076)

| | | | | | | | | |
|---|---|---|---|---|---|---|---|---|
| sum of scores | 29 | 18 | 28 | 22 | 37 | 14 | 30 | 18 |
| No. of participants | 19 | 14 | 17 | 15 | 21 | 10 | 20 | 11 |
| affected | | | | | | | | |

Changes in appetite (p* = 0.065)

| | | | | | | | | |
|---|---|---|---|---|---|---|---|---|
| sum of scores | 8 | 7 | 12 | 12 | 19 | 6 | 7 | 5 |
| No. of participants | 6 | 6 | 9 | 10 | 13 | 4 | 5 | 4 |
| affected | | | | | | | | |

Hard to breathe/choking (p* = 0.129)

| | | | | | | | | |
|---|---|---|---|---|---|---|---|---|
| sum of scores | 4 | 4 | 5 | 3 | 7 | 0 | 5 | 1 |
| No. of participants | 4 | 3 | 3 | 3 | 5 | 0 | 5 | 1 |
| affected | | | | | | | | |

Heart pounding/racing (p* = 0.744)

| | | | | | | | | |
|---|---|---|---|---|---|---|---|---|
| sum of scores | 7 | 5 | 6 | 4 | 8 | 2 | 3 | 3 |
| No. of participants | 6 | 3 | 4 | 3 | 5 | 2 | 3 | 3 |
| affected | | | | | | | | |

Sleeping problems (p* = 0.915)

| | | | | | | | | |
|---|---|---|---|---|---|---|---|---|
| sum of scores | 18 | 14 | 30 | 16 | 21 | 12 | 19 | 11 |
| No. of participants | 12 | 10 | 15 | 11 | 15 | 10 | 14 | 8 |
| affected | | | | | | | | |

Concentration problems (p* = 0.915)

| | | | | | | | | |
|---|---|---|---|---|---|---|---|---|
| sum of scores | 18 | 8 | 28 | 15 | 20 | 8 | 16 | 5 |
| No. of participants | 14 | 8 | 18 | 13 | 15 | 6 | 9 | 3 |
| affected | | | | | | | | |

Nervousness/stress (p* = 0.937)

| | | | | | | | | |
|---|---|---|---|---|---|---|---|---|
| sum of scores | 27 | 17 | 27 | 18 | 24 | 13 | 32 | 18 |
| No. of participants | 18 | 13 | 17 | 13 | 17 | 11 | 20 | 15 |
| affected | | | | | | | | |

Angriness/tension (p* = 0.478)

| | | | | | | | | |
|---|---|---|---|---|---|---|---|---|
| sum of scores | 17 | 11 | 19 | 13 | 19 | 9 | 23 | 8 |
| No. of participants | 13 | 9 | 13 | 9 | 16 | 8 | 18 | 8 |
| affected | | | | | | | | |

Headaches (p* = 0.511)

| | | | | | | | | |
|---|---|---|---|---|---|---|---|---|
| sum of scores | 14 | 8 | 11 | 11 | 20 | 12 | 12 | 5 |
| No. of participants | 10 | 6 | 8 | 8 | 13 | 10 | 10 | 1 |
| affected | | | | | | | | |

Muscle aches/pains (p* = 0.391)

| | | | | | | | | |
|---|---|---|---|---|---|---|---|---|
| sum of scores | 13 | 6 | 9 | 8 | 12 | 5 | 11 | 7 |
| No. of participants | 11 | 5 | 8 | 7 | 8 | 4 | 7 | 1 |
| affected | | | | | | | | |

Stiffness (p* = 0.376)

| | | | | | | | | |
|---|---|---|---|---|---|---|---|---|
| sum of scores | 8 | 2 | 9 | 5 | 12 | 2 | 6 | 4 |
| No. of participants | 6 | 2 | 7 | 4 | 9 | 2 | 5 | 3 |
| affected | | | | | | | | |

Dizziness (p* = 0.732)

| | | | | | | | | |
|---|---|---|---|---|---|---|---|---|
| sum of scores | 5 | 5 | 4 | 2 | 5 | 1 | 1 | 1 |
| No. of participants | 4 | 3 | 3 | 2 | 4 | 1 | 1 | 1 |
| affected | | | | | | | | |

N* = number of participants included in the ITT population; scores: 0 - not bothered, 1 - mildly bothered, 2 - somewhat bothered, and 3 - very bothered.
*p-value for ANOVA (omnibus test).

### Cholesterol and Triglyceride Levels

[0246] Blood samples were gathered at the start of the study prior to any treatment and again at the end of the 45 day treatment period. There was no significant effect of treatment within groups, nor was there any significant effect of treatment as compared with baseline for high density lipoproteins, low density lipoproteins, total cholesterol and triglyceride concentrations (Table 17).

TABLE 17
Cholesterol and triglyceride levels at baseline,
and at the end of the study (N = 98)

| | | | |
|---|---|---|---|
| | Bacillus | Bacillus | Probiotic |
| Placebo | clausii | megaterium | cocktail |
| (N* = 24) | (N* = 24) | (N* = 25) | (N* = 25) |

HDL [mmol/L] (p = 0.749)

| | | | | |
|---|---|---|---|---|
| Baseline: mean (SD) | 1.4 (0.2): | 1.6 (0.3): | 1.5 (0.4): | 1.6 (0.4): |
| Post: mean (SD) | 1.4 (0.2) | 1.5 (0.3) | 1.4 (0.3) | 1.6 (0.4) |

LDL [mmol/L] (p = 0.894)

| | | | | |
|---|---|---|---|---|
| Baseline: mean (SD) | 3.3 (0.9): | 3.5 (0.8): | 3.7 (1.0): | 3.4 (0.7): |
| Post: mean (SD) | 3.3 (0.9) | 3.4 (0.8) | 3.7 (1.0) | 3.3 (0.7) |

TC [mmol/L] (p = 0.976)

| | | | | |
|---|---|---|---|---|
| Baseline: mean (SD) | 5.3 (1.2): | 5.6 (1.0): | 5.9 (1.5): | 5.5 (0.9): |
| Post: mean (SD) | 5.0 (1.1) | 5.4 (1.0) | 5.6 (1.2) | 5.3 (0.9) |

TG [mmol/L] (p = 0.548)

| | | | | |
|---|---|---|---|---|
| Baseline: mean (SD) | 1.0 (0.6): | 1.0 (0.4): | 1.8 (3.6): | 1.2 (1.2): |
| Post: mean (SD) | 1.2 (0.7) | 1.2 (0.8) | 1.7 (2.6) | 1.3 (1.2) |

N* = number of participants included in the ITT population, HDL = high-density lipoprotein, LDL = low-density lipoprotein, TC = total cholesterol, TG = triglycerides.
*p-value for ANOVA (omnibus test)

### Blood Cytokine Levels

TABLE 18
IL-8 and TNFα levels at baseline, and at the end of the study (N = 98)

| | | | |
|---|---|---|---|
| | Bacillus | Bacillus | Probiotic |
| Placebo | clausii | megaterium | cocktail |
| (N* = 24) | (N* = 24) | (N* = 25) | (N* = 25) |

IL-8 [pg/mL] (p = 0.887)

| | | | | |
|---|---|---|---|---|
| Baseline: mean (SD) | 99.65 (60.87): | 105.4 (59.02): | 100 (58.47): | 94.72 (71.38): |
| Post: mean (SD) | 94.17 (70.96) | 127 (89.38) | 120.3 (82.96) | 146.5 (107.6) |

TNFα [pg/mL] (p = 0.662)

| | | | | |
|---|---|---|---|---|
| Baseline: mean (SD) | 445.2 (322.6): | 490.7 (244.9): | 358.7 (180.4): | 549.3 (492.9): |
| Post: mean (SD) | 452.7 (345.3) | 525.9 (416.8) | 473.2 (331.4) | 573.1 (423) |

N* = number of participants included in the ITT population,
*p-value for ANOVA (omnibus test)

[0247] Blood samples were gathered at the start of the study prior to any treatment and again at the end of the 45 day treatment period. There was no significant effect of treatment within groups, nor was there any significant effect of treatment as compared with baseline for IL-8 or TNFa (Table 18).

### Blood Antioxidant Levels

TABLE 19
Antioxidant levels at baseline, and at the end of the study (N = 98)

| | | | |
|---|---|---|---|
| | Bacillus | Bacillus | Probiotic |
| Placebo | clausii | megaterium | cocktail |
| (N* = 24) | (N* = 24) | (N* = 25) | (N* = 25) |

Conc. Of Trolox Equivalent [nmole/mL] (p = 0.831)

| | | | | |
|---|---|---|---|---|
| Baseline: mean (SD) | 3898 (316.5): | 3941 (319.8): | 3855 (366.3): | 3943 (290): |
| Post: mean (SD) | 3919 (483.7) | 4007 (364.3) | 3983 (420.9) | 3916 (361.5) |

N* = number of participants included in the ITT population,
*p-value for ANOVA (omnibus test)

[0248] Blood samples were gathered at the start of the study prior to any treatment and again at the end of the 45 day treatment period. There was no significant effect of treatment within groups, nor was there any significant effect of treatment as compared with baseline for antioxidant levels (Table 10).

### Metabolite Levels

TABLE 20
Amino acid levels at baseline, and at the end of the study (N = 98)

| | | | |
|---|---|---|---|
| | Bacillus | Bacillus | Probiotic |
| Placebo | clausii | megaterium | cocktail |
| (N* = 24) | (N* = 24) | (N* = 25) | (N* = 25) |

Aspartate [mg/L] (*p = 0.3752)

| | | | | |
|---|---|---|---|---|
| Baseline: mean (SD) | 1.947 (0.6): | 1.427 (0.3): | 1.382 (0.3): | 2.183 (0.8): |
| Post: mean (SD) | 2.244 (1.1) | 1.526 (0.6) | 1.309 (0.5) | 2.569 (1.0) |

Serine [mg/L] (*p = 0.6652)

| | | | | |
|---|---|---|---|---|
| Baseline: mean (SD) | 16.891 (6.1): | 11.094 (2.7): | 15.203 (1.9): | 14.255 (4.1): |
| Post: mean (SD) | 16.406 (4.3) | 11.625 (3.5) | 15.718 (5.5) | 16.388 (4.5) |

Histidine [mg/L] (*p = 0.8230)

| | | | | |
|---|---|---|---|---|
| Baseline: mean (SD) | 57.285 (14.6): | 48.185 (8.7): | 64.944 (12.2): | 52.170 (11.1): |
| Post: mean (SD) | 59.280 (11.9) | 51.156 (11.2) | 71.494 (20.6) | 59.894 (12.7) |

Arginine [mg/L] (*p = 0.7104)

| | | | | |
|---|---|---|---|---|
| Baseline: mean (SD) | 28.951 (13.2): | 21.006 (7.3): | 25.925 (7.9): | 21.759 (8.8): |
| Post: mean (SD) | 26.675 (11.3) | 22.846 (8.8) | 24.431 (11.6) | 24.413 (11.1) |

Glutamine [mg/L] (*p = 0.8118)

| | | | | |
|---|---|---|---|---|
| Baseline: mean (SD) | 18.254 (7.2): | 10.970 (2.9): | 16.626 (6.6): | 15.973 (6.1): |
| Post: mean (SD) | 17.266 (6.0) | 9.747 (3.3) | 14.395 (6.7) | 16.925 (6.2) |

Glycine [mg/L] (*p = 0.8067)

| | | | | |
|---|---|---|---|---|
| Baseline: mean (SD) | 17.272 (5.0): | 12.164 (4.5): | 20.620 (4.9): | 14.508 (4.2): |
| Post: mean (SD) | 16.450 (4.1) | 11.660 (3.2) | 21.257 (8.0) | 15.903 (3.5) |

Threonine [mg/L] (*p = 0.8875)

| | | | | |
|---|---|---|---|---|
| Baseline: mean (SD) | 12.658 (4.5): | 9.641 (2.1): | 12.005 (2.6): | 11.847 (3.4): |
| Post: mean (SD) | 12.939 (4.1) | 9.574 (2.3) | 12.656 (5.2) | 13.365 (3.7) |

Alanine [mg/L] (*p = 0.5359)

| | | | | |
|---|---|---|---|---|
| Baseline: mean (SD) | 27.476 (7.9): | 19.316 (4.6): | 25.346 (6.1): | 23.329 (6.1): |
| Post: mean (SD) | 25.796 (7.3) | 20.151 (6.4) | 25.924 (9.5) | 26.976 (6.7) |

Proline [mg/L] (*p = 0.5683)

| | | | | |
|---|---|---|---|---|
| Baseline: mean (SD) | 19.101 (6.3): | 13.542 (3.8): | 19.477 (3.0): | 16.487 (4.7): |
| Post: mean (SD) | 19.581 (6.7) | 14.221 (3.6) | 20.163 (6.6) | 20.570 (5.8) |

Tyrosine [mg/L] (*p = 0.4548)

| | | | | |
|---|---|---|---|---|
| Baseline: mean (SD) | 10.617 (4.0): | 7.542 (2.2): | 11.594 (2.1): | 9.326 (3.5): |
| Post: mean (SD) | 10.337 (2.7) | 7.786 (2.0) | 11.759 (3.4) | 11.112 (3.0) |

Valine [mg/L] (*p = 0.8116)

| | | | | |
|---|---|---|---|---|
| Baseline: mean (SD) | 16.720 (4.2): | 12.976 (2.9): | 19.415 (3.1): | 16.746 (4.4): |
| Post: mean (SD) | 17.916 (5.0) | 13.512 (4.3) | 20.359 (4.7) | 19.411 (3.9) |

Methionine [mg/L] (*p = 0.5286)

| | | | | |
|---|---|---|---|---|
| Baseline: mean (SD) | 2.850 (1.0): | 2.117 (0.5): | 2.710 (0.4): | 2.546 (0.8): |
| Post: mean (SD) | 2.926 (0.9) | 2.280 (0.7) | 2.803 (0.9) | 3.037 (0.7) |

Lysine [mg/L] (*p = 0.3400)

| | | | | |
|---|---|---|---|---|
| Baseline: mean (SD) | 22.722 (6.5): | 17.765 (4.1): | 20.404 (4.5): | 22.181 (5.3): |
| Post: mean (SD) | 24.508 (6.5) | 18.470 (6.8) | 20.734 (6.6) | 27.171 (7.1) |

Isoleucine [mg/L] (*p = 0.9065)

| | | | | |
|---|---|---|---|---|
| Baseline: mean (SD) | 6.354 (2.0): | 4.684 (1.1): | 6.754 (1.1): | 6.236 (1.6): |
| Post: mean (SD) | 6.955 (2.2) | 5.149 (1.9) | 7.321 (1.8) | 7.412 (1.7) |

Leucine [mg/L] (*p = 0.6745)

| | | | | |
|---|---|---|---|---|
| Baseline: mean (SD) | 13.418 (5.2): | 9.122 (2.3): | 13.446 (2.0): | 12.612 (3.9): |
| Post: mean (SD) | 13.865 (4.7) | 9.694 (3.6) | 14.082 (3.6) | 15.162 (3.6) |

Phenylalanine [mg/L] (*p = 0.6375)

| | | | | |
|---|---|---|---|---|
| Baseline: mean (SD) | 8.701 (3.2): | 6.138 (1.3): | 9.376 (1.6): | 7.864 (2.1): |
| Post: mean (SD) | 8.586 (2.1) | 6.460 (1.7) | 9.870 (2.5) | 8.925 (2.1) |

N* = number of participants included in the ITT population,
*p-value for ANOVA (omnibus test)

[0249] Blood samples were gathered at the start of the study prior to any treatment and again at the end of the 45 day treatment period. There was no significant effect of treatment within groups, nor was there any significant effect of treatment as compared with baseline for the amino acids tested (Table 20).

TABLE 21
Mineral levels at baseline, and at the end of the study (N = 98)

| | | | |
|---|---|---|---|
| | Bacillus | Bacillus | Probiotic |
| Placebo | clausii | megaterium | cocktail |
| (N* = 24) | (N* = 24) | (N* = 25) | (N* = 25) |

Riboflavin [μg/L] (*p = 0.4222)

| | | | | |
|---|---|---|---|---|
| Baseline: mean (SD) | 452 (16): | 453 (12): | 455 (27): | 453 (13): |
| Post: mean (SD) | 451 (16) | 450 (9) | 450 (12) | 457 (17) |

Nicotinic acid B3 [μg/L] (*p = 0.6467)

| | | | | |
|---|---|---|---|---|
| Baseline: mean (SD) | 7 (0.33): | 7 (0.42): | 8 (0.45): | 7 (0.9): |
| Post: mean (SD) | 7 (0.34) | 7 (0.46) | 7 (0.45) | 7 (0.3) |

Pantoneic acid [μg/L] (*p = 0.8899)

| | | | | |
|---|---|---|---|---|
| Baseline: mean (SD) | 142 (5): | 144 (6): | 146 (4): | 140 (4): |
| Post: mean (SD) | 142 (5) | 143 (6) | 147 (5) | 141 (3) |

Folic acid [μg/L] (*p = 0.5073)

| | | | | |
|---|---|---|---|---|
| Baseline: mean (SD) | 300 (215): | 286 (112): | 377 (164): | 275 (139): |
| Post: mean (SD) | 311 (214) | 283 (112) | 385 (189) | 250 (106) |

N* = number of participants included in the ITT population,
*p-value for ANOVA (omnibus test)

[0250] Blood samples were gathered at the start of the study prior to any treatment and again at the end of the 45 day treatment period. There was no significant effect of treatment within groups, nor was there any significant effect of treatment as compared with baseline for mineral levels (Table 21).

### Microbiota Changes

[0251] Samples from subjects collected before and after the treatment period were selected for comprehensive microbiota analysis. After removal of short reads and low quality reads, 202,413 sequences were retained, with a mean of 2,736 sequences per sample and an average length of 440 nucleotides. Using the ESPRIT-tree, and after removal of OTUs containing less than 10 sequences, 1,077 and 1,618 OTUs at the 95 and 98% similarity level were retained.

[0252] FIG. 31 is a boxplot showing the Chao1 values distribution in each experimental group for Day 1 and Day 45. Dotted lines connect the paired samples. A paired Wilcoxon test was used to compare the distribution of the groups. A p-value less than 0.05 should be considered as statistically significant.

[0253] FIG. 32 is a boxplot showing the Chao1 values distribution in each experimental group for Day 1 and Day 45. A Wilcoxon test was used to compare the distribution of each experimental group against the Placebo. A p-value less than 0.05 should be considered as statistically significant.

[0254] FIG. 33 illustrates PCoA clustering performed on the Bray-Curtis dissimilarity matrix. Each treatment is separated in a different tab while colours and shape are associated with the time points. Samples from the two time points tend to cluster together for all the treatments, and the data are not significantly different from each other at day 1 baseline readings. Samples were not significantly different from each other as a consequence of treatment within or between groups.

TABLE 22
Proportion of people that had reported symptoms of respiratory
tract infection in Participant diary 1 (N = 123).

| | Bacillus | | Bacillus | | Bacillus | | Probiotic | | | |
|---|---|---|---|---|---|---|---|---|---|---|
| | coagulans | | clausii | | megaterium | | cocktail | | Placebo | |
| | (N* = 25) | | (N* = 24) | | (N* = 25) | | (N* = 25) | | (N* = 24) | |
| Fever (%) | 1/25 | (4.0) | 2/24 | (8.3) | 2/25 | (8.0) | 1/25 | (4.0) | 2/24 | (8.3) |
| Headache (%) | 6/25 | (24.0) | 7/24 | (29.2) | 8/25 | (32.0) | 5/25 | (20.0) | 6/24 | (25.0) |
| Stuffed nose (%) | 2/25 | (8.0) | 2/24 | (8.3) | 2/25 | (8.0) | 1/25 | (4.0) | 3/24 | (12.5) |
| Runny nose thick | 0/25 | (0.0) | 0/24 | (0.0) | 0/25 | (0.0) | 3/25 | (12.0) | 0/24 | (0.0) |
| Runny nose watery (%) | 2/25 | (8.0) | 3/24 | (12.5) | 5/25 | (20.0) | 1/25 | (4.0) | 3/24 | (12.5) |
| Sore throat (%) | 0/25 | (0.0) | 1/24 | (4.2) | 5/25 | (20.0) | 3/25 | (12.0) | 4/24 | (16.7) |
| Dry cough (%) | 2/25 | (8.0) | 2/24 | (8.3) | 2/25 | (8.0) | 1/25 | (4.0) | 3/24 | (12.5) |
| Productive cough (%) | 0/25 | (0.0) | 0/24 | (0.0) | 1/25 | (4.0) | 2/25 | (8.0) | 2/24 | (8.3) |
| Sore ear (%) | 0/25 | (0.0) | 0/24 | (0.0) | 0/25 | (0.0) | 1/25 | (4.0) | 0/24 | (0.0) |

N* = number of participants included in the ITT population

[0255] A significant difference among treatment groups was detected only in the number of days with runny nose-thick (p*=0.018) probably due the fact that only three participants in Probiotic cocktail group had reported this symptom, while in other four treatment groups none of the participants had reported this symptom. However, further analysis (Mann-Whitney U test with Holm's correction) where number of days with runny nose-thick was compared between Probiotic cocktail group and placebo group, did not show significant differences, probably due to the low sample size.

TABLE 23
Proportion of people with clinically relevant infection
reported in Participant diary 1 (N = 123).

| | Bacillus | Bacillus | Bacillus | Probiotic | |
|---|---|---|---|---|---|
| | coagulans | clausii | megaterium | cocktail | Placebo |
| | (N* = 25) | (N* = 24) | (N* = 25) | (N* = 25) | (N* = 24) |
| Gastrointestinal | 0/25 (0.0) | 0/24 (0.0) | 0/25 (0.0) | 0/25 (0.0) | 2/24 (8.3) |
| infection (%) | | | | | |
| Respiratory tract | 1/25 (4.0) | 2/24 (8.3) | 2/25 (8.0) | 3/25 (12.0) | 6/24 (25.0) |
| infection (%) | | | | | |
| Urinary tract | 1/25 (4.0) | 0/24 (0.0) | 1/25 (4.0) | 2/25 (8.0) | 1/24 (4.2) |
| infection (%) | | | | | |

N* = number of participants included in the ITT population

[0256] Kruskal-Wallis test did not show any significant differences in the number of days with clinically relevant infection treatment groups. However, a borderline statistically significant result was observed for clinically relevant gastrointestinal infection. This is probably due the fact that only no participants in the four probiotic treatment groups experienced clinically relevant gastrointestinal infection, while in probiotic group in total 2 days of such infection were observed, which could have happened by chance.

[0257] Nevertheless, compared to placebo, none of the study products containing probiotics showed a statistically significant difference.

TABLE 24
Proportion of loose/hard stool per all stools in
weeks 6 and 7 of the treatment period (N = 121)

| | | | | |
|---|---|---|---|---|
| Bacillus | Bacillus | Bacillus | Probiotic | |
| coagulans | clausii | megaterium | cocktail | Placebo |
| (N = 24) | (N = 23) | (N = 25) | (N = 25) | (N = 24) |

Loose stool (p = 0.033)*

| | | | | | |
|---|---|---|---|---|---|
| mean (SD): | 7% (10%): | 4% (14%): | 4% (10%): | 2% (4%): | 8% (19%): |
| min-max | 0%-26% | 0%-50% | 0%-40% | 0%-13% | 0%-91% |
| p-value vs | 0.591 | 0.150 | 0.271 | 0.186 | / |
| placebo | | | | | |

Hard stool (p = 0.528)*

| | | | | | |
|---|---|---|---|---|---|
| mean (SD): | 22% (29%): | 13% (27%): | 9% (16%): | 15% (27%): | 14% (27%): |
| min-max | 0%-100% | 0%-100% | 0%-56% | 0%-100% | 0%-100% |

*p-value for Kruskal-Wallis test. If p < 0.05, individual comparisons with placebo were calculated (Mann-Whitney U test with Holm's correction).

[0258] A significant difference among groups was detected in the proportion of loose stools in the total treatment period as well as in weeks 6 and 7 of the treatment period. However, further analysis (Mann-Whitney U test with Holm's correction) did not show significant differences, probably due to the low sample size. The participants in the Probiotic cocktail group had the smallest proportion of loose stool per all stools.

TABLE 25
Proportion of people that reported symptoms of gastrointestinal
infection in Participant diary 2 (N = 118)

| | Bacillus | Bacillus | Bacillus | Probiotic | |
|---|---|---|---|---|---|
| | coagulans | clausii | megaterium | cocktail | Placebo |
| | (N* = 25) | (N* = 24) | (N* = 25) | (N* = 25) | (N* = 24) |
| Loss of apetite (%) | 0/24 (0.0) | 0/23 (0.0) | 0/23 (0.0) | 0/25 (0.0) | 1/23 (4.3) |
| Diarrhea (%) | 0/24 (0.0) | 1/23 (4.3) | 1/23 (4.3) | 0/25 (0.0) | 1/23 (4.3) |
| Constipation (%) | 0/24 (0.0) | 0/23 (0.0) | 0/23 (0.0) | 0/25 (0.0) | 3/23 (13.0) |
| Vomiting (%) | 0/24 (0.0) | 0/23 (0.0) | 0/23 (0.0) | 0/25 (0.0) | 1/23 (4.3) |
| Gases (%) | 0/24 (0.0) | 1/23 (4.3) | 1/23 (4.3) | 2/25 (8.0) | 2/23 (8.7) |
| Bowel sounds (%) | 0/24 (0.0) | 0/23 (0.0) | 0/23 (0.0) | 0/25 (0.0) | 0/23 (0.0) |
| Cramping/stomach | 1/24 (4.2) | 1/23 (4.3) | 0/23 (0.0) | 1/25 (4.0) | 2/23 (8.7) |
| pain (%) | | | | | |
| Bloating (%) | 1/24 (4.2) | 1/23 (4.3) | 0/23 (0.0) | 0/25 (0.0) | 1/23 (4.3) |

N* = number of participants included in the ITT population

[0259] A significant difference among groups was detected only in the number of days with constipation (p*=0.013) probably due the fact that only three participants in Placebo group had reported this symptom in Participant diary 2, while in other four treatment groups none of the participants had reported this symptom. However, further analysis (Mann-Whitney U test with Holm's correction) where number of days with constipation was compared between individual probiotic group and placebo group did not show significant differences, probably due to low sample size.

[0260] This study has addressed the safety and efficacy of new probiotics, namely Bacillus coagulans, Bacillus clausii, Bacillus megaterium and probiotic cocktail containing Bacillus subtilis, Bacillus megaterium, Bacillus clausii and Bacillus coagulans.

[0261] The gastrointestinal health of the participants at baseline among the treatment groups did not differ between the study groups, which was expected due to randomization.

[0262] The primary outcome of the study (safety) was achieved, as 17 AEs were reported in total with no SAEs. Causality assessment revealed no relation between the reported AEs and the study products.

[0263] None of the efficacy related outcomes showed any statistically significant difference, however this comes as no surprise due to small sample size per study group. Still, some trends favouring active products were observed, specifically in the Gut-brain axis scores and proportion of loose stools.

[0264] To conclude, probiotic products showed to be safe to use in adults, and have shown some favourable data regarding Gut-brain axis and stool consistency.

### DISCUSSION

[0265] The use of Bacillus probiotics in maintenance of gut health has been largely supported in the last years and has driven its clinical applications. Their favorable effects have been linked to several properties, such as antimicrobial and immunomodulatory activity, regulation of cell growth and differentiation, cell-cell signaling, cell adhesion, signal transcription and transduction, production of vitamins and gut protection from genotoxic agents.

[0266] This trial was conducted to evaluate the effect of three probiotic treatments on general wellness and gastrointestinal symptoms in healthy adults. There were no safety or tolerability concerns and no adverse events. With this small study cohort in healthy individuals without any gastrointestinal issues, there were no negative effects on stool regularity and consistency, and no negative effects on sadness, irritability, energy, appetite, tension, stress, sleep, cardiovascular events, aches and pains, and dizziness. In fact, we report a decrease in the incidence of loose stools throughout the intervention period attributable to the administration of the probiotic cocktail.

### REFERENCES

[0267] Abriouel, H., Franz, C., Omar, N., & Galvez, A. (2011). Diversity and applications of Bacillus bacteriocins. FEMS Microbiology Reviews, 35 (1), 201-232. doi: doi.org/10.1111/j.1574-6976.2010.00244.x
[0268] Afrilasari W, Widanarni, Meryadini A (2016) “Effect of Probiotic Bacillus Megaterium PTB 1.4 on the Population of Intestinal Microflora, Digestive Enzyme Activity and the Growth of Catfish (Clarias Sp.).” HAYATI Journal of Biosciences, vol. 23, no. 4, pp. 168-172., doi: 10.1016/j.hjb.2016.12.005.
[0269] Alippi, A. (1995). Detection of Bacillus larvae spores in Argentinian honeys by using a semi-selective medium. Microbiology SEM, 11, 343-350.
[0270] Alippi A, Reynaldi F, Lopez A, De Giusti M, Aguilar O (2004) “Molecular Epidemiology of Paenibacillus Larvae Larvae and Incidence of American Foulbrood in Argentinean Honeys from Buenos Aires Province.” Journal of Apicultural Research, vol. 43, no. 3 pp. 135-143., doi: 10.1080/00218839.2004.11101124.
[0271] Baron, M. (2009). Original Research: A Patented Strain of Bacillus coagulans Increased Immune Response to Viral Challenge. Postgraduate Medicine, 121 (2), 114-118. doi: 10.3810/pgm.2009.03.1971
[0272] Benno, Y., Suzuki, K., Suzuki, K., Narisawa, K., Bruce, W. R., & Mitsuoka, T. (1986). Comparison of the Fecal Microflora in Rural Japanese and Urban Canadians. Microbiology and Immunology, 30 (6), 521-532. doi: 10.1111/j.1348-0421.1986.tb02978.x
[0273] Chan, Y. K., Estaki, M., & Gibson, D. L. (2013). Clinical Consequences of Diet-Induced Dysbiosis. Annals of Nutrition and Metabolism, 63 (s2), 28-40. doi: 10.1159/000354902
[0274] Cutting, S. M. (2011). Bacillus probiotics. Food Microbiology, 28 (2), 214-220. doi: 10.1016/j.fm.2010.03.007
[0275] Dolin, B. (2009). Effects of a proprietary Bacillus coagulans preparation on symptoms of diarrhea-predominant irritable bowel syndrome. Methods and Findings in Experimental and Clinical Pharmacology, 31 (10), 655. doi: 10.1358/mf.2009.31.10.1441078
[0276] Elshaghabee, F. M. F., Rokana, N., Gulhane, R. D., Sharma, C., & Panwar, H. (2017). Bacillus As Potential Probiotics: Status, Concerns, and Future Perspectives. Frontiers in Microbiology, 8. doi: 10.3389/fmicb.2017.01490
[0277] Endres, J., Clewell, A., Jade, K., Farber, T., Hauswirth, J., & Schauss, A. (2009). Safety assessment of a proprietary preparation of a novel Probiotic, Bacillus coagulans, as a food ingredient. Food and Chemical Toxicology, 47 (6), 1231-1238. doi: 10.1016/j.fct.2009.02.018
[0278] Ferreira, C. M. H., Vilas-Boas, Â., Sousa, C. A., Soares, H. M. V. M., & Soares, E. V. (2019). Comparison of five bacterial strains producing siderophores with ability to chelate iron under alkaline conditions. AMB Express, 9 (1). doi: 10.1186/s13568-019-0796-3
[0279] Gabrielli, M., Lauritano, E. C., Scarpellini, E., Lupascu, A., Ojetti, V., Gasbarrini, G., Gasbarrini, A. (2009). Bacillus clausii as a Treatment of Small Intestinal Bacterial Overgrowth. The American Journal of Gastroenterology, 104 (5), 1327-1328. doi: 10.1038/ajg.2009.91
[0280] Gepner, Y., Hoffman, J. R., Shemesh, E., Stout, J. R., Church, D. D., Varanoske, A. N., . . . Ostfeld, I. (2017). Combined effect of Bacillus coagulans GBI-30, 6086 and HMB supplementation on muscle integrity and cytokine response during intense military training. Journal of Applied Physiology, 123 (1), 11-18. doi: 10.1152/japplphysiol.01116.2016
[0281] Gilliam, Martha. (1979) “Microbiology Of Pollen And Bee Bread: The Genus Bacillus.” Apidologie, vol. 10, no. 3, pp. 269-274., doi: 10.1051/apido:19790304.
[0282] Gilliam, Martha, and Diane K. Valentine. (1976) “Bacteria Isolated from the Intestinal Contents of Foraging Worker Honey Bees, Apis Mellifera: The Genus Bacillus.” Journal of Invertebrate Pathology, vol. 28, no. 2, pp. 275-276., doi: 10.1016/0022-2011 (76) 90137-3.
[0283] Horosheva, T. V., Vodyanoy, V., & Sorokulova, I. (2014). Efficacy of Bacillus probiotics in prevention of antibiotic-associated diarrhoea: a randomized, double-blind, placebo-controlled clinical trial. JMM Case Reports, 1 (3). doi: 10.1099/jmmcr.0.004036
[0284] Hun, L. (2009). Original Research: Bacillus coagulans Significantly Improved Abdominal Pain and Bloating in Patients with IBS. Postgraduate Medicine, 121 (2), 119-124. doi: 10.3810/pgm.2009.03.1984
[0285] Hyronimus, B., Marrec, C. L., Sassi, A. H., & Deschamps, A. (2000). Acid and bile tolerance of spore-forming lactic acid bacteria. International Journal of Food Microbiology, 61 (2-3), 193-197. doi: 10.1016/s0168-1605 (00) 00366-4
[0286] Ivanovics, G. & Alfoldi, L. (1957). Bacteriocinogenesis in Bacillus megaterium. J. gen. Microbiol. 16, 522
[0287] Jensen, G., Cash, H., Farmer, S., & Keller, D. (2017). Inactivated probiotic Bacillus coagulans GBI-30 induces complex immune activating, anti-inflammatory, and regenerative markers in vitro. Journal of Inflammation Research, Volume 10, 107-117. doi: 10.2147/jir.s141660
[0288] Kalman, D. S., Schwartz, H. I., Alvarez, P., Feldman, S., Pezzullo, J. C., & Krieger, D. R. (2009). A prospective, randomized, double-blind, placebo-controlled parallel-group dual site trial to evaluate the effects of a Bacillus coagulans-based product on functional intestinal gas symptoms. BMC Gastroenterology, 9 (1). doi: 10.1186/1471-230x-9-85
[0289] Kawarizadeh, A., Nojoomi, F., Tabatabaei, M., Hosseinzadeh, S., & Farzaneh, M. (2019). The effect of Bacillus coagulans on cytotoxicity and apoptosis induced by Salmonella typhimurium in HT-29 cell culture. Iranian Journal of Microbiology. doi: 10.18502/ijm.v11i4.1468
[0290] Keller, D., Dinter, R. V., Cash, H., Farmer, S., & Venema, K. (2017). Bacillus coagulans GBI-30, 6086 increases plant protein digestion in a dynamic, computer-controlled in vitro model of the small intestine (TIM-1). Beneficial Microbes, 8 (3), 491-496. doi: 10.3920/bm2016.0196
[0291] Khochamit, N., Siripornadulsil, S., Sukon, P., & Siripornadulsil, W. (2015). Antibacterial activity and genotypic-phenotypic characteristics of bacteriocin-producing Bacillus subtilis KKU213: Potential as a probiotic strain. Microbiological Research, 170, 36-50. doi: 10.1016/j.micres.2014.09.004
[0292] Kimmel, M., Keller, D., Farmer, S., & Warrino, D. (2010). A controlled clinical trial to evaluate the effect of GanedenBC30 on immunological markers. Methods and Findings in Experimental and Clinical Pharmacology, 32 (2), 129. doi: 10.1358/mf.2010.32.2.1423881
[0293] Kotb, E. (2014). Purification and partial characterization of serine fibrinolytic enzyme from Bacillus megaterium KSK-07 isolated from kishk, a traditional Egyptian fermented food. Applied Biochemistry and Microbiology, 51 (1), 34-43. doi: 10.1134/s000368381501007x
[0294] Lakshmi, S. G., Jayanthi, N., Saravanan, M., & Ratna, M. S. (2017). Safety assessment of Bacillus clausii UBBC07, a spore forming probiotic. Toxicology Reports, 4, 62-71. doi: 10.1016/j.toxrep.2016.12.004
[0295] Liu, P., Xie, J., Liu, J., & Ouyang, J. (2019). A novel thermostable β-galactosidase from Bacillus coagulans with excellent hydrolysis ability for lactose in whey. Journal of Dairy Science, 102 (11), 9740-9748. doi: 10.3168/jds.2019-16654
[0296] Marseglia, G. L., Tosca, M., Cirillo, I., Licari, A., Leone, M., Marseglia, A., Ciprandi, G. (2007). Efficacy of Bacillus clausii spores in the prevention of recurrent respiratory infections in children: a pilot study. Therapeutics and Clinical Risk Management, 3 (1), 13-17. doi: 10.2147/tcrm.2007.3.1.13
[0297] Mazzoli, A., Donadio, G., Lanzilli, M., Saggese, A., Guarino, A. M., Rivetti, M., Isticato, R. (2019). Bacillus megaterium SF185 spores exert protective effects against oxidative stress in vivo and in vitro. Scientific Reports, 9 (1). doi: 10.1038/s41598-019-48531-4
[0298] Neag, M. A., Catinean, A., Muntean, D. M., Pop, M. R., Bocsan, C. I., Botan, E. C., & Buzoianu, A. D. (2020). Probiotic Bacillus Spores Protect Against Acetaminophen Induced Acute Liver Injury in Rats. Nutrients, 12 (3), 632. doi: 10.3390/nu12030632
[0299] Nista, E. C., Candelli, M., Cremonini, F., Cazzato, I. A., Zocco, M. A., Franceschi, F., Gasbarrini, A. (2004). Bacillus clausii therapy to reduce side-effects of anti-Helicobacter pylori treatment: randomized, double-blind, placebo controlled trial. Alimentary Pharmacology and Therapeutics, 20 (10), 1181-1188. doi: 10.1111/j.1365-2036.2004.02274.x
[0300] Nithya, V., & Halami, P. M. (2012). Evaluation of the probiotic characteristics of Bacillus species isolated from different food sources. Annals of Microbiology, 63 (1), 129-137. doi: 10.1007/s13213-012-0453-4
[0301] Padgham, J., and R. Sikora. (2007) “Biological Control Potential and Modes of Action of Bacillus megaterium against Meloidogyne Graminicola on Rice.” Crop Protection, vol. 26, no. 7, pp. 971-977., doi: 10.1016/j.cropro.2006.09.004.
[0302] Pelletier, A. & Sygush, J (1990). Purification and characterization of three chitosanase activities from Bacillus megaterium P1. Appl Environ Microbiol 56, 844-848
[0303] Ripert, G., Racedo, S. M., Elie, A.-M., Jacquot, C., Bressollier, P., & Urdaci, M. C. (2016). Secreted Compounds of the Probiotic Bacillus clausii Strain O/C Inhibit the Cytotoxic Effects Induced by Clostridium difficile and Bacillus cereus Toxins. Antimicrobial Agents and Chemotherapy, 60 (6), 3445-3454. doi: 10.1128/aac.02815-15
[0304] Rochín-Medina, J. J., Ramírez-Medina, H. K., Rangel-Peraza, J. G., Pineda-Hidalgo, K. V., & Iribe-Arellano, P. (2017). Use of whey as a culture medium for Bacillus clausii for the production of protein hydrolysates with antimicrobial and antioxidant activity. Food Science and Technology International, 24 (1), 35-42. doi: 10.1177/1082013217724705
[0305] Salvetti, E., Orrù, L., Capozzi, V, Martina Am Lamontanara A, Keller D, Cash H, Felis G, Cattivelli L, Torriani S, Spano G. (2016) Integrate genome-based assessment of safety for probiotic strains: Bacillus coagulans GBI-30, 6086 as a case study. Appl Microbiol Biotechnol 100:4595. https://doi.org/10.1007/s00253-016-7416-9
[0306] Scholle M D, White C A, Kunnimalaiyaan M, Vary P S (2003) “Sequencing and Characterization of pBM400 from Bacillus megaterium QM B1551.” Applied and Environmental Microbiology, vol. 69, no. 11, pp. 6888-6898., doi: 10.1128/aem.69.11.6888-6898.2003.
[0307] Sharma, S., & Kanwar, S. S. (2017). Adherence potential of indigenous lactic acid bacterial isolates obtained from fermented foods of Western Himalayas to intestinal epithelial Caco-2 and HT-29 cell lines. Journal of Food Science and Technology, 54 (11), 3504-3511. doi: 10.1007/s13197-017-2807-1
[0308] Snowdon, Jill A, and Dean O Cliver. (1996) “Microorganisms with Honey.” International Journal of Food Microbiology.
[0309] Sudha, M., Radkar, N., & Maurya, A. (2012). Effect of Supplementation of Probiotic Bacillus coagulans Unique IS-2 on Hypercholesterolemia Subjects: A Clinical Study. International Journal of Probiotics and Prebiotics, 6 (2).
[0310] Sudha, M. R., Yelikar, K. A., & Deshpande, S. (2012). Clinical Study of Bacillus coagulans Unique IS-2 (ATCC PTA-11748) in the Treatment of Patients with Bacterial Vaginosis. Indian Journal of Microbiology, 52 (3), 396-399. doi: 10.1007/s12088-011-0233-z
[0311] Sudha, M. R., Bhonagiri, S., & Kumar, M. A. (2013). Efficacy of Bacillus clausii strain UBBC-07 in the treatment of patients suffering from acute diarrhoea. Beneficial Microbes, 4 (2), 211-216. doi: 10.3920/bm2012.0034
[0312] Sudha, M. R., Jayanthi, N., Aasin, M., Dhanashri, R., & Anirudh, T. (2018). Efficacy of Bacillus coagulans Unique IS2 in treatment of irritable bowel syndrome in children: a double blind, randomised placebo controlled study. Beneficial Microbes, 9 (4), 563-572. doi: 10.3920/bm2017.0129
[0313] Sudha, M. R., Jayanthi, N., Pandey, D., & Verma, A. (2019). Bacillus clausii UBBC-07 reduces severity of diarrhoea in children under 5 years of age: a double blind placebo controlled study. Beneficial Microbes, 10 (2), 149-154. doi: 10.3920/bm2018.0094
[0314] Sumathi C, Nandhini A, Padmanaban J (2017) “Antagonistic Activity of Probiotic Bacillus megaterium against Streptococcus mutans.” International Journal of Pharma and Bio Science, vol. 8, no. 1, doi: 10.22376/ijpbs.2017.8.1.p270-274.
[0315] Thakur, K., Tomar, S. K., & De, S. (2016). Lactic acid bacteria as a cell factory for riboflavin production. Microbial Biotechnology, 9 (4), 441-451. doi: 10.1111/1751-7915.12335
[0316] Tysset, C., Durand, C., and Taliergio, Y. P. (1970) Contribution to the study of the microbial contamination and the hygiene of commercial honey. Rec. Med. Vet. 146, 1471-1492.
[0317] Vary, P. S., Biedendieck, R., Fuerch, T., Meinhardt, F., Rohde, M., Deckwer, W., & Jahn, D. (2007). Bacillus megaterium—from simple soil bacterium to industrial protein production host. Applied Microbiology and Biotechnology, 76 (5), 957-967. doi: 10.1007/s00253-007-1089-3
[0318] von Tersch, M. A. and Carlton, B. C. (1983) Bacteriocin from Bacillus megaterium ATCC 19213: comparative studies with megacin A-216. Journal of Bacteriology 155, 866-871.

[0319] The invention is not limited to the embodiment described herein but can be amended or modified without departing from the scope of the present invention.

[0320] The use of the terms “a,” “an,” “the,” and similar referents in the context of describing the present invention (especially in the context of the claims) are to be construed to cover both the singular and the plural, unless otherwise indicated herein or clearly contradicted by context. Recitation of ranges of values herein are merely intended to serve as a shorthand method of referring individually to each separate value falling within the range, unless otherwise indicated herein, and each separate value is incorporated into the specification as if it were individually recited herein. Use of the term “about” is intended to describe values either above or below the stated value in a range of approximately ±10%; in other embodiments, the values may range in value above or below the stated value in a range of approximately ±5%; in other embodiments, the values may range in value above or below the stated value in a range of approximately ±2%; in other embodiments, the values may range in value above or below the stated value in a range of approximately ±1%. The preceding ranges are intended to be made clear by context, and no further limitation is implied. All methods described herein can be performed in any suitable order unless otherwise indicated here in or otherwise clearly contradicted by context. The use of any and all examples, or exemplary language (e.g., “such as”) provided herein, is intended merely to better illuminate the invention and does not pose a limitation on the scope of the invention unless otherwise stated. No language in the specification should be construed as indicating any non-claimed element as essential to the practice of the invention.

[0321] While in the foregoing specification this invention has been described in relation to certain embodiments thereof, and many details have been put forth for the purpose of illustration, it will be apparent to those skilled in the art that the invention is susceptible to additional embodiments and that certain of the details described herein can be varied considerably without departing from the basic principles of the invention.

[0322] All references cited herein are incorporated by reference in their entireties. The present invention may be embodied in other specific forms without departing from the spirit or essential attributes thereof, and, accordingly, reference should be made to the appended claims, rather than to the foregoing specification, as indicating the scope of the invention.

1. A Bacillus megaterium strain comprising a purified microbial population that comprises one or more bacteria with a gyrB that shares at least 97% identity with SEQ ID NO: 1; and/or that comprises one or more bacteria with a 16S rRNA that shares at least 97% identity with SEQ ID NO: 2.

2. The Bacillus megaterium strain of claim 1 that shares at least 97% identity with SEQ ID NO: 3.

3. The Bacillus megaterium strain of claim 1 wherein the purified microbial population comprises a bacterium with a 16S nucleic acid sequence comprising SEQ ID NO:2.

4. The Bacillus megaterium strain of claim 1 wherein the purified microbial population comprises a bacterium with gyrB nucleic acid sequence comprising SEQ ID NO: 1.

5. The Bacillus megaterium strain of claim 1 wherein the purified microbial population comprises a bacterium with a 16S nucleic acid sequence comprising SEQ ID NO: 2 and with a gyrB nucleic acid sequence comprising SEQ ID NO: 1; optionally wherein the purified microbial population comprises a bacterium comprising SEQ ID NO: 3.

6. A microbial composition comprising the Bacillus megaterium strain of claim 1 together with a comestibly acceptable carrier and/or diluent.

7. The microbial composition of claim 6, wherein a unit dose of the composition comprises 10⁶-10¹³ CFU of the Bacillus megaterium strain.

8. The microbial composition of claim 6, further comprising a mucous adherent excipient.

9. The microbial composition of claim 6, further comprising at least one further probiotic Bacillus spp. strain.

10. The microbial composition of claim 6, wherein the microbial composition is formulated as a tablet, a pill, a capsule, a powder, a solution, a suspension, or an emulsion.

11. The microbial composition of claim 6, wherein the microbial composition is formulated as a food.

12. (canceled)

13. A method of treating vaginal infections, urinary tract infections, gastrointestinal infections, gastrointestinal diseases, improving immune health, protection against oxidative stress, cleansing and detoxification, improving metabolic health or cardiovascular health, the method comprising the step of administering to a human subject the Bacillus megaterium strain of claim 1.

14. (canceled)

15. A method of treating vaginal infections, urinary tract infections, gastrointestinal infections, gastrointestinal diseases, improving immune health, protection against oxidative stress, cleansing and detoxification, improving metabolic health or cardiovascular health, the method comprising the step of administering to a human subject the microbial composition of claim 6.

16. A method of improving microbiome within a subject, comprising the step of administering to the subject a composition comprising a probiotic, wherein the probiotic comprises the Bacillus megaterium strain of claim 1.

17. (canceled)

18. (canceled)

The application's sequence listing, which the Patent Office published only in electronic form, follows.

SEQUENCE LISTING (3 sequences)

SEQ ID NO: 1 - DNA, 1923 bp, Bacillus megaterium
  source 1..1923: mol_type = genomic DNA
ttgacgatggaacaaaaagaagtacaagcatatgaagctgatcagatacaagtattagaaggattagaggctgttcgtaaacgtccggggatgtatattggatcgacgagcgcaaagggtttacatcatcttgtatgggaaattgtagataatagtattgatgaagcgctggccggctattgcgatgaaattaatgttattatcgaaaaggataatagtattacagtcaaagataacggtcgtggaattccggttggtattcaagaaaaaatgggcagacctgccgttgaagttatcttaacggttcttcatgccggaggtaaatttggcggcggcggctataaagtatccggtggattacatggtgtaggtgcctcagttgttaacgcactttctacctctttggaagtgtacgtacatcgtgatggtaaagttcattatcaaaaatatgaacgaggtgtaccggctgctgacttaaaagtagttggagaaacagataaaacaggtactgttattcaattccatccagacggtgaaatttttacagaaacgcttgaatacgattttgatacgttagctaatcgtctgcgtgagttagctttcttaaatcgcggtattaaaattacgattgaagacaaacgtgaagaagataaaagacgtgagtatcactatgaaggcggaattaagtcttacgttgaacacttaaaccgtgcaaaagaagtaattcacgaagagccgatctatattgaaggtaatcgagacaacatttctgtagaaattgctattcaatataacgatagctatacaagtaatttatattcttttgcaaacaacattcacacatatgaaggtggaacgcacgaagcaggatttaaaacagcgttaacgcgtgtaattaacgactatgcacgtaaaaacagcgtatttaaagacagtgatgccaatctaacgggtgaagatgttcgtgaaggaattacagctatcatctctattaagcacccagatccgcagtttgaaggacaaacaaaaacaaagctgggaaatagtgaagcaagaacaattactgactctgtgtttgcagaacacttagaaacgtacttgctagagaaccctattgtggcaaaaaaggtaattgaaaaaggtttaatggctgcaagagcaagaatggcagctaaaaaagctcgtgagcttacaagacgtaaaagcgcgcttgaaatctcaaacttaccgggtaaattagcagattgttcatcaaaagatccttctattagcgaactctatgtagtagagggtgactctgcgggaggatcagctaagcagggaagaagccgtcatttccaagctattttgcctttacgtggtaaaattatcaacgtagagaaagcccgtttagataaaattttatctaataacgaaattcgtacaatcattaccgctctaggaacgggtattggtgacgattttgatatctcgaaagcacgctaccataaaattgtgatcatgacagatgcagacgtggacggtgcgcatattcgtacgcttcttctaacgttcttctatcgctatatgagacagattattgagcatggatatgtgtacattgcccagccgcctctttacaaagtttcacaaggtaaaaaagtggagtacgcgtacaacgatcgtcaattagaagaggtattagcttctttccctgaaggcgcaaaaccaaaccttcagcgttacaaaggtttaggagagatgaatcctgaacaattatgggaaacaacaatggatccagagttccgtacccttcttcaagtgaacttgcaagatgcaattgaagctgatgagacatttgaaattttaatgggcgacaaagtagaaccacgccgtaatttcattgaagaaaatgctcagtacgtaaaaaatcttgatatttaa

SEQ ID NO: 2 - DNA, 1540 bp, Bacillus megaterium
  source 1..1540: mol_type = genomic DNA
agagtttgatcctggctcaggatgaacgctggcggcgtgcctaatacatgcaagtcgagcgaactgattagaagcttgcttctatgacgttagcggcggacgggtgagtaacacgtgggcaacctgcctgtaagactgggataacttcgggaaaccgaagctaataccggataggatcttctccttcatgggagatgattgaaagatggtttcggctatcacttacagatgggcccgcggtgcattagctagttggtgaggtaacggctcaccaaggcaacgatgcatagccgacctgagagggtgatcggccacactgggactgagacacggcccagactcctacgggaggcagcagtagggaatcttccgcaatggacgaaagtctgacggagcaacgccgcgtgagtgatgaaggctttcgggtcgtaaaactctgttgttagggaagaacaagtacaagagtaactgcttgtaccttgacggtacctaaccagaaagccacggctaactacgtgccagcagccgcggtaatacgtaggtggcaagcgttatccggaattattgggcgtaaagcgcgcgcaggcggtttcttaagtctgatgtgaaagcccacggctcaaccgtggagggtcattggaaactggggaacttgagtgcagaagagaaaagcggaattccacgtgtagcggtgaaatgcgtagagatgtggaggaacaccagtggcgaaggcggctttttggtctgtaactgacgctgaggcgcgaaagcgtggggagcaaacaggattagataccctggtagtccacgccgtaaacgatgagtgctaagtgttagagggtttccgccctttagtgctgcagctaacgcattaagcactccgcctggggagtacggtcgcaagactgaaactcaaaggaattgacgggggcccgcacaagcggtggagcatgtggtttaattcgaagcaacgcgaagaaccttaccaggtcttgacatcctctgacaactctagagatagagcgttccccttcgggggacagagtgacaggtggtgcatggttgtcgtcagctcgtgtcgtgagatgttgggttaagtcccgcaacgagcgcaacccttgatcttagttgccagcatttagttgggcactctaaggtgactgccggtgacaaaccggaggaaggtggggatgacgtcaaatcatcatgccccttatgacctgggctacacacgtgctacaatggatggtacaaagggctgcaagaccgcgaggtcaagccaatcccataaaaccattctcagttcggattgtaggctgcaactcgcctacatgaagctggaatcgctagtaatcgcggatcagcatgccgcggtgaatacgttcccgggccttgtacacaccgcccgtcacaccacgagagtttgtaacacccgaagtcggtggagtaaccgtaaggagctagccgcctaaggtgggacagatgattggggtgaagtcgtaacaaggtagccgtatcggaaggtgcggctggatcacct

SEQ ID NO: 3 - DNA, 5442674 bp, Bacillus megaterium (residues 1-1,814,225 of 5,442,674)
  misc_difference 285093..285192: note = n is a, c, g, t or u
  misc_difference 286876..286975: note = n is a, c, g, t or u
  misc_difference 289709..289808: note = n is a, c, g, t or u
  misc_difference 290037..290136: note = n is a, c, g, t or u
  misc_difference 293723..293822: note = n is a, c, g, t or u
  misc_difference 310240..310339: note = n is a, c, g, t or u
  misc_difference 320398..320497: note = n is a, c, g, t or u
  misc_difference 334732..334831: note = n is a, c, g, t or u
  misc_difference 352540..352639: note = n is a, c, g, t or u
  misc_difference 357100..357199: note = n is a, c, g, t or u
  misc_difference 361890..361989: note = n is a, c, g, t or u
  misc_difference 365030..365129: note = n is a, c, g, t or u
  misc_difference 366366..366465: note = n is a, c, g, t or u
  misc_difference 369081..369180: note = n is a, c, g, t or u
  misc_difference 396532..396631: note = n is a, c, g, t or u
  misc_difference 413012..413111: note = n is a, c, g, t or u
  misc_difference 456124..456223: note = n is a, c, g, t or u
  misc_difference 492731..492830: note = n is a, c, g, t or u
  misc_difference 510078..510177: note = n is a, c, g, t or u
  misc_difference 1211610..1211709: note = n is a, c, g, t or u
  misc_difference 1213463..1213562: note = n is a, c, g, t or u
  misc_difference 1612216..1612315: note = n is a, c, g, t or u
  misc_difference 1660890..1660989: note = n is a, c, g, t or u
  misc_difference 1661347..1661446: note = n is a, c, g, t or u
  misc_difference 1661959..1662058: note = n is a, c, g, t or u
  misc_difference 1662572..1662671: note = n is a, c, g, t or u
  misc_difference 1664647..1664746: note = n is a, c, g, t or u
  misc_difference 1665107..1665206: note = n is a, c, g, t or u
  misc_difference 1665375..1665474: note = n is a, c, g, t or u
  misc_difference 1667606..1667705: note = n is a, c, g, t or u
  misc_difference 1960933..1961032: note = n is a, c, g, t or u
  misc_difference 1962618..1962717: note = n is a, c, g, t or u
  misc_difference 2041611..2041710: note = n is a, c, g, t or u
  misc_difference 2042037..2042136: note = n is a, c, g, t or u
  misc_difference 2042279..2042378: note = n is a, c, g, t or u
  misc_difference 2058614..2058713: note = n is a, c, g, t or u
  misc_difference 2058943..2059042: note = n is a, c, g, t or u
  misc_difference 2094217..2094316: note = n is a, c, g, t or u
  misc_difference 2094650..2094749: note = n is a, c, g, t or u
  misc_difference 2095233..2095332: note = n is a, c, g, t or u
  misc_difference 2145872..2145971: note = n is a, c, g, t or u
  misc_difference 2288718..2288817: note = n is a, c, g, t or u
  misc_difference 2289327..2289426: note = n is a, c, g, t or u
  misc_difference 2449277..2449376: note = n is a, c, g, t or u
  misc_difference 2449605..2449704: note = n is a, c, g, t or u
  misc_difference 2623807..2623906: note = n is a, c, g, t or u
  misc_difference 2624202..2624301: note = n is a, c, g, t or u
  misc_difference 2708781..2708880: note = n is a, c, g, t or u
  misc_difference 3117513..3117612: note = n is a, c, g, t or u
  misc_difference 3122206..3122305: note = n is a, c, g, t or u
  misc_difference 3154831..3154930: note = n is a, c, g, t or u
  misc_difference 3158863..3158962: note = n is a, c, g, t or u
  misc_difference 3174364..3174463: note = n is a, c, g, t or u
  misc_difference 3528856..3528955: note = n is a, c, g, t or u
  misc_difference 3628996..3629095: note = n is a, c, g, t or u
  misc_difference 3673086..3673185: note = n is a, c, g, t or u
  misc_difference 3692341..3692440: note = n is a, c, g, t or u
  misc_difference 3701369..3701468: note = n is a, c, g, t or u
  misc_difference 3735218..3735317: note = n is a, c, g, t or u
  misc_difference 3756492..3756591: note = n is a, c, g, t or u
  misc_difference 3789247..3789346: note = n is a, c, g, t or u
  misc_difference 3821065..3821164: note = n is a, c, g, t or u
  misc_difference 3823466..3823565: note = n is a, c, g, t or u
  misc_difference 3834555..3834654: note = n is a, c, g, t or u
  misc_difference 3835622..3835721: note = n is a, c, g, t or u
  misc_difference 3840732..3840831: note = n is a, c, g, t or u
  misc_difference 3845768..3845867: note = n is a, c, g, t or u
  misc_difference 3847694..3847793: note = n is a, c, g, t or u
  misc_difference 3853646..3853745: note = n is a, c, g, t or u
  misc_difference 3904833..3904932: note = n is a, c, g, t or u
  misc_difference 3916011..3916110: note = n is a, c, g, t or u
  misc_difference 3932635..3932734: note = n is a, c, g, t or u
  misc_difference 3943727..3943826: note = n is a, c, g, t or u
  misc_difference 3974728..3974827: note = n is a, c, g, t or u
  misc_difference 4033361..4033460: note = n is a, c, g, t or u
  misc_difference 4073484..4073583: note = n is a, c, g, t or u
  misc_difference 4125414..4125513: note = n is a, c, g, t or u
  misc_difference 4164179..4164278: note = n is a, c, g, t or u
  misc_difference 4320059..4320158: note = n is a, c, g, t or u
  misc_difference 4356086..4356185: note = n is a, c, g, t or u
  misc_difference 4357514..4357613: note = n is a, c, g, t or u
  misc_difference 4462059..4462158: note = n is a, c, g, t or u
  misc_difference 4469603..4469702: note = n is a, c, g, t or u
  misc_difference 4474027..4474126: note = n is a, c, g, t or u
  misc_difference 4540507..4540606: note = n is a, c, g, t or u
  misc_difference 4543512..4543611: note = n is a, c, g, t or u
  misc_difference 4773064..4773163: note = n is a, c, g, t or u
  misc_difference 4946528..4946627: note = n is a, c, g, t or u
  misc_difference 5000268..5000367: note = n is a, c, g, t or u
  misc_difference 5020301..5020400: note = n is a, c, g, t or u
  misc_difference 5378890..5378899: note = n is a, c, g, t or u
  misc_difference 5379030..5379039: note = n is a, c, g, t or u
  misc_difference 5379272..5379281: note = n is a, c, g, t or u
  misc_difference 5379719..5379728: note = n is a, c, g, t or u
  misc_difference 5380250..5380259: note = n is a, c, g, t or u
  misc_difference 5380402..5380411: note = n is a, c, g, t or u
  misc_difference 5381198..5381207: note = n is a, c, g, t or u
  misc_difference 5381593..5381602: note = n is a, c, g, t or u
  misc_difference 5381734..5381743: note = n is a, c, g, t or u
  misc_difference 5382210..5382219: note = n is a, c, g, t or u
  misc_difference 5382442..5382451: note = n is a, c, g, t or u
  misc_difference 5384627..5384636: note = n is a, c, g, t or u
  misc_difference 5384869..5384878: note = n is a, c, g, t or u
  misc_difference 5394187..5394196: note = n is a, c, g, t or u
  misc_difference 5394417..5394426: note = n is a, c, g, t or u
  misc_difference 5394595..5394604: note = n is a, c, g, t or u
  misc_difference 5394751..5394760: note = n is a, c, g, t or u
  misc_difference 5412850..5412859: note = n is a, c, g, t or u
  misc_difference 5413303..5413312: note = n is a, c, g, t or u
  misc_difference 5413760..5413769: note = n is a, c, g, t or u
  misc_difference 5424507..5424516: note = n is a, c, g, t or u
  misc_difference 5424645..5424654: note = n is a, c, g, t or u
  misc_difference 5424906..5424915: note = n is a, c, g, t or u
  misc_difference 5425369..5425378: note = n is a, c, g, t or u
  misc_difference 5425542..5425551: note = n is a, c, g, t or u
  misc_difference 5425987..5425996: note = n is a, c, g, t or u
  misc_difference 5426410..5426419: note = n is a, c, g, t or u
  misc_difference 5426629..5426638: note = n is a, c, g, t or u
  misc_difference 5427239..5427248: note = n is a, c, g, t or u
  misc_difference 5427679..5427688: note = n is a, c, g, t or u
  misc_difference 5427839..5427848: note = n is a, c, g, t or u
  misc_difference 5428327..5428336: note = n is a, c, g, t or u
  misc_difference 5434176..5434185: note = n is a, c, g, t or u
  misc_difference 5434328..5434337: note = n is a, c, g, t or u
  misc_difference 5434575..5434584: note = n is a, c, g, t or u
  misc_difference 5438370..5438379: note = n is a, c, g, t or u
  misc_difference 5442274..5442283: note = n is a, c, g, t or u
  source 1..5442674: mol_type = genomic DNA
  misc_difference 4591221..4591320: note = n is a, c, g, t or u
tttcaaataatttccagtaaataacattcgttactggtctagtttcgtgatgctttttttaagtaaattgccctttgataactttacgttctttcatttttcagttgacatactaccgcaggtctttcaactttactgtttctgtatgatatcatcttaatacgacactttttgtcatattaaaagaaaaaggtgaaaataaatggctaagtctagacggcttgttgatatgctcatgtttattaatacaaaaagaacgtttacggcaaaagaactagcggaggaatttggtctttctgtgcggaccgtccagcgctatttactggacttaagtgaattaggactgcctctttacagtgaaaaaggacggagcggcggctatagagtgctaaaaaatcgtattctccctcctattttgtttacagaagaagaagctatttctatcttttttgcttatcaagctctgcagtattatcatgaccttccgtttgatgcagaaattcatgcggctcttcaaaaattttatgtttacctgtctgaggaaacaaagaaaaaagcagataaaatgagtgctcatattgcgttttggaatcctaaaagaaaccttgacactccttatttaaaagcgcttttagaagcaagccttgcaggaaaatatattgaatttctttatgattcaaaggagggtcaaacaagaaaagaagtcaaaccccttggaatttatgctcataacggtttatggtactgtcctgcttattcttacaataagcaaaaagtattattgtttcgagcggatcgtattcgctcgttaaaagttttagaaaaagacaaaaatatgtctcttacgttaaaggaatggcttgaaacagaaccggtaaattcacagccaattttgttaaaagtaaccttgacacacgaaggcgttcgtcagtgtaaaagcgttccatggcttgaaaatcatgtgaaggtggcgcgtgatggaaatgggtacatcgatacaataactgatggaaatgaattaaactacatggcttcttttttctataccttaggggctcatgcttttattgaagaacctcaggagctaattaaaaagatctgctgtcacgcagaagaaacgttaaggcgctataaaaatgaagtggggacaaaagacgaataaatgggagaaatgaatttcgtatggcttgcatgtgacaccgcggttgattggagtcttcaccttgccctccaatcaaccgctacaagtcactaaatagatgaaatctacgtttactctaccaataaaaagatccgaacgattcatcgttcggatcttccttcaaccaactaaactacttttatcctagcctctttttaatttacccagcccacacgtcttttgcgtatcggcctttttcttctagctgctgcagccataagcgagcgtctgcttcactcacttggtgaacgtcagcatagcttttcataagcgttgcttcaacggcaggtgccatttggcttccgtctccgcaaatatagaagtgcgctccttgatcaagaagttcaatcaatttcttgccgtcttgttccattacgtgctgaacgtatgttttcggctgatttggcatgcgagaaaaagcggtatgaagcgtaatgatgccttcgctttgggcgttttcaagctcttcttgatacagatagtcttcatgaggtgaacggcagccgaagtataaatgtgcttctccaagtgactgtccttgttcttttagctgtttgcgcgcctgcacaaagcctctaaacggcgcgacgcctgttcccggtccgaccatgataagcggcgtttcagggtcttttggcagcgtaaattctgactgcggtgtggaaataaagcacgtaatcgtatctccttcttgcagctcggcaagatagttcgacgcaattcctttatattctccatatccgctccacgcttctcctgagacaacgctgaccgtgatgcttgcttgtttttcatcgacacgaggtgatgaagaaatcgagtaatagcgcgggcgtatgcttggcagaagggcgataaattcgctgaatttcatttcacacgccgggtatttttcaagcagttcaagcattgttaaacgttttgccagcacttgttctttgtaggcttgcttttcaagcaaggcttcaagctctactttatgcggcgggcagaccgttttagcagccattgcgcgaagctgcgtgcgcgtaacaggatcttgaagctccacgtattgcagaagctcttctacggatactgttttagcgagtggcaaatgagctaatttttcttcttctgcttccagacggatttgctgtgatgcatctaggccgaaccttgctgttacacggtttactattccttcatagttgcgaggaataacacctaaatgatctccttcttgataagaagcttcttttggaagttcaatttcaagatgtcgcgtgcttcgtgcactgcctggctgttgaagttctttgcttgctacgacgttcgttgaaaacgcaccgtgcattttcgcaagcggcatatccgcggcgctgtcgacaaattgaagtgaaagagtagatttattatcttcactgttttcaatgtcgaggttaaagtaggctgctacgtcactccacatatgttcacgccattcttcatatgtgccttcaaagtcgtcgcttgcatctgcttcaccgcggtcagcgatgttttctgcccctttagcggcaagcgtttcatcgataaaagcaggcactttttgatacgtagtagcccagtttttatcgccgcatccaaatacggagtagcgaacgccttttacttcatcagcagacgcttggtctaaccagtcgacaaattgctttgcgttatcaggcggatgaccgttataagacgccgttacaattaatacagctccttcgcgcggaagatttccggcgtgtgaatcaagcgttgcgacctgcggtgcaaatcctttgctcattgcaatatctgctaaatcacgcgccgttccttcagctgttcccatatttgaaccgtatagcacaagcagcggcgtattatgagcgttttctgcctttttgcgtacttttttagcagactgttcagtgctaggtgaaggaataccgccaagcggaatttttttcgattttgcttttaccacaaagccttcaggttttaacgttaaagtttctttaatatccagctcgtagtttgtatgatcttcaaagtcaaagtgttttagcatcataccaagtaccagcgttgcttcatgaagagcgaactgctgaccgatacacgcacgctgaccgtttccaaacggtttaaacgcatgctgcggaatcgcacttggattttcaaaacgctctggacggaactcttccacatcgtctccccaaattgttttatcacggtgaagctgaggaatcagaaccattagttcgtcgcctttttctaaaggatattctcctccaagcaccgtatcttcttttgcatatagggaaaacgcaggagcagttggccataagcgcagcgcttcgtttaagaccatgccgacatatttaagctgtttgacttgtttgtagcttggaacaggatctactagaactcgtgctgcttcttctgctgctttttgtaatacatgtggatttttcactaagaaatacagcgcaaatgataaaagaccacttgttgtttcgtgtcccgcaattaagaatgtaataatttgatagcgaatgttctcgtcatcaagcggctcacccgtttctggatcttttccgtttagcatatgcgttaataaatcatcgctttgttcaccgcttgctttgcgatctgcaataattttatctactaggtcgttcatcaccttgatatcttcttgaaactggcgcttgttttcatcataagctgggtcgtctggatttgctcgctgcagcttgttcattgcttcatccagtgcacggaccatacttgtaataaatggatgaggctgatctcggtaaaagctgttaaagcgatagttaaagccgcaaagaccaattgtatcaagcgttaaacgtgtcatgtcttccggtacttcaatatgctcatctgcatttagacgctcccacttttgaacaagctgcacggcgatatcgaccatcatcgcatgatagcctttcattgcctgctgactgaagcttggaagtaagatattatgcgcttttttccaatttttttcatgcgtccagcttgtaaataacccgtctcctgcaaaatcacgtacaaatttaagcgcttgacttaagtttttatcaaagcgtgattcatcgcatgcttctttaattagacgctgacttgataagtagcgcgttacacgaccaggcgcctcgaatttaaagatttctcctaattcatccgcaattttcatcaaagcttgaaccggtttatctgtgtttaataacggtaaatttttaagctctccaaacgtttttggctgaggcatttctttaattgtcatgttatccctctttcacttgttaagtttcatgattgtctgctaagtgctgcccacagactctcttctacaccggtaagaagttcatcagttaaagataagtagtcattttcaatcatttcatatacttccatgaaacttccaaataaaatagcaattagcgcattttcaggaagatttctaatcacaccttgcttttgtccttctctgaagaacgtacaaacaaattccaccagcttttgatatgctaagcggctctcttctgttaaaaaagttccttggctatgagttttaataaatccaagagcacgaggatggtttttagtaaatgtcaccataccttcaaagatatgatgaaacccatctcggtatccatctctctcgtttgccagaccgctttcaatgcactgtaaaaactcgtttacgtgctgttggaataattcatttacaaggctttctttatttttaaagtagcgataaattgttcctgctcctactttggcattctctgcaatcattggcatcgtggttgcatcaaaccctctttctgcaaacagcagaagcgaagcagaaaaaatcgctttttgttttgttggagtagattccactttatcacctcttttcaaaaacggaatgaacgttcattccgctacaattacaagtataaaaaactgcatcttaatagtaaaaagataactagaaaagtggaaagaaaaggttctttcattctaattttataccatttaaaggtaattaacagagtatttcagaatatttagtgcttacagaaaattagtccacttatcccctctattaacataatttagcacgaattattaatgaaagaagtttaaaggaaaagcaacgtggaaatagaaaagagttacacaaggcgtaaaggaggattaaaaatgaatcaagcaagagttatagaatacgaagaaatgcttcgctcagccatgctttctaataacatagagctattagaagaattactttcagatgagcttatttttgtgaatcaccttgggcaatggttgtcaaaagaagaagatataaatgttcatcgttcaaaaagtcttgatatagcgggcatggaagtgttggaacaagaagttaaactgtttcaagaacttgccgttaccgttacaaaagtagcgttaaatggggcactggcaaccggtgaatctattggaggtgaatacagttatacgcgagtttggaaagatgttgaagggaaattaaaggttgtttcttgtcactgcagttctagcgcataatcaacgcagtcacaacaaaaaacatccctcctttcgtttgcattcgccaagggggatgtttttttactagttaaaagattttcttcctgtctctgtcatcttttaaaatctccacggcctcgcggaaccgctgtgagtgaacaatctctctttctcgtaaaaatcgtaagctgtcgtttaaatcgggatcatctgatatatcaattaaccattgatatgtagctcttgctttttcttctgcagctatgtcttcataaagatctgcaatcggatctccttttgcctgtatataagtagctgtaaacggaaccccagcagcattattgtaataaagtgcactatcatggttcacatagtgttctgctaatcccgctgccttcagctgctctggcgttgcatcttttgttagcttataaatcatcgtagcaatcatttcaagatgagcaaactcttctgtcccgatatcgtttagcagtccaaccactttatcgggaatcgtatagcgctgattcaaataccgaagtgctgccgcaagctctccgtccgctcccccgtattgttccattaaatatttggcaagcgttggattacacgtgcttactttcactggatactgtaatttcttttcatacacccacatatagctcccgcctttatctgcttatatttgccatggccaagggcttgttccccagctccactttccgtcggtatagctgtttccatattgctggagcggcccgtactttgtttcaaagtttctttttaactgcatagcctgctgcgcgtattcgttaaactgctgcatagcctgctggtcatttggatgggtatctaaatacagcgttaattctactagtgcaaaatcaatcgcctgtatttcttctaaatcctgatagtactccggaggtagatttttcattcttcatccctcttcttatctttgtatggattttcatagtagtcccaaaaagccggccacagcgttcctttttttagggcttctttcggtgaaaactgctgcagattcggcggctgaaatcccatgtataattgaggcggcgtagaataatatttaactcctatcggccggcaaggatcatagatactgtggaaaggttgataagtcttaaccggtgtaaacatcttttttggattgttatccatgagaagtcctcctctaacaaacacactctgtttaatcctattcagcttttatcgagttcatgaaggaatttacttccgacttaggaactaaacttttcttcgtaaaaaagacctatataaaaaacgctataattgcccaatccctttaggcagctttctcatactttataaaatagtgataaaaaatagaggtgattaaaaaatggacattagctacatggatttttatttgtacccgacaagatttcctggacctcaactcccgcccggtccacctagaccaccaggcggtttgcctacacctaacccgcagcaagctccaacttcccctccgccggcatttattccagctcaacaaacggcaactccatttgctgttgatccaggagctatttctctatgtctcttccgcaatacgttcatatggcttagaaacggctctagcttctggtattttcctatttttgtaggaccgcgatccgttgcaggatttagatggaacggacgtttctggaccattttcggtgtggatacacgacaaattgtttcgtttacgtgtttttaaacgtaaaaaaagccttatttttcaataaggcttttttacttactaactgcgattacactattgtttttatcccaaaaccaatcagcagcactccgctgcatcgttgaaaggctttttgaaacaccggttttttaagccattttttcatgtaatctattacatacaccaagattaaaaaccatcctactgctataagcgtcagaataaaaccgagtatcagcagctgttgatttgtgtgtgcatccaagttaataaactggggcataaacgtaatataaactaataccgttttaggattaagaaaattactaagagccccttgcatatatgattctctatagcagcgattagatgaagactttacagtttttgtttcttctgaaatggcctctaatgagagcgtatttttggtcagaaatattctgatacctacgtaaaataagtacgctgcccctatgtatttaatcgtgttaaacagatacaccgactgcgcaatagcaacagacaagccaagcacagcaattaacgtccaaaacgtgaggcctgtagccatgccgagtatggtaaaacgtcctgcttttgctccgtgatgaagcgtatttttcatgataagaattgtatcagcaccaggtatcatggacatgaccaatgccatcagcatataagcagctaaatgatccacagctcttctctcccttctaagctattactagcatcctgttttcttttcactttcaaagattttcatgtattgttttggtgttagcccaacctgacttttaaaaaatcgagtcaaatgactttgatcactgaatcccgttaaaaaagatacgtcaatcggttttttcccttgctctagcagctttttagcctgattgattcgaattgtttccaagtagctatatggagaaattcctttttgctttgtaaaagagcgcagcagccggtatttgctccatccaattagctgacttaactcatccagcgtaatcttgtttgtatagttgtcttccaaatagctgcagattgttgtgatttcatgggacgtgtcaacggctgacgaaagaaaagaaagattcgaatgatcctgcatgagttcttctagcaaatataaaaataactcttctttcttaaactcacgttcaccatttaaaatttgcaaatgaagctcttttaaactagagacagcatcacttctttgcaccacgctgctgttaaaacgcggaagactttcactgccgttaatgtcaaaaacagcttttttcatcacttctggcgccacattaatacagcgataatcaagcgttttgccatctatttgttcacagctatggacatcatacggattaaacagcagcaaatctcctggattaatgatgtattctttgccttggcaaattaaatggcgctgaccttcttcaataaatccaatcacataatactcgtgaaaatgatcaggaaatttttgcataatccctttaaaacgataagcttcaatatgtaaatcagcgtcaacgtgcgccgtgcgaatttcttttaccatccataaattcctccttgtcacatcctaagctttttaaccataccattgactaaagaatttttcttgtatgatattgcagatgagacttttttccattacttttatccgttcagctaggggtggtactaatcactcttaagagtgatttctcttctttcctctagtaattttccgctcaaatgataaaatatagacacattttatggacgaaagaagggataccgtgaaatatagacaaattaaatggctgattttgcttcttccaactctgaccatcgcgctttgggagtatgttcgtcatgcctttttgctcccttacatctcaatggatatgggaaatgtgctttctccgctccttgtcttttttgtaacgcttgtatttgtccgctatttattttctattttagaaaaaatgcaagaggaactaagacaggaaaaagaaaagaaagcagcacttattgaacgtgaaaaattagctcgtgaactgcatgacggcattgcacagtcgctgtttctcctatctgttaaaatgaacaagttcgaaagaaaaaataaattagaacaggatcctgactttatccgaatgaaacaaaccctgcagcatgttcatgacgatacgcgccaagcgattacaaatttaaagcactctccttcagactcttcagaaagctggactgaaagcattcatcaatacgtcgatgatttaacacatactcatttactagatgtaaatttagattggagactgtcagaaacaacgctgtccagaaaagaaaaaaacgagctgtttgcctgtgtgaaagaagcggctatgaatgtaatcaaacatgcaaaaacgaataaaatctggattacagccactgaaacggccgggggatggatttgtgaaattacagattttggtacaggttttacgtccgactctctcaagtccggtcttggtttgcaaattatgaaagatcgtgcgaaggacatgaactgggacttttccatggagcgaaaacagaaccaaaccattgttagcattaaaaagggggttatgtaaatgcagccgtttcgtattttgattgtagatgatcatgctcatgcgagagaaggcattcgcgatattttagaagaatatgaagattttattattgttggcgaaggaaccaacgggcaagaagccattgaactgactgaaaagttaatgcctgatatcgtcctaatggacattggaatgcctgtgatggacgggttagaagcgacaaaacaaattaagcttcagtttccgtacgttaaaattgtggttatcacggtttcagacgatattacggatttatttgatgcgctgaaaaaaggcgcacagggctatttgcttaaaaacctgcagtctgaagtgtggtacgactatttgcgtgcgttcgctttagatgaagttcctatgtcaaaagaaattgcgtttcaaattttaaaagagtttccgcaagaaacatcgataaaaaaaaccgacactcccctttctgcacgagagcttgaagtacttcaattagtggctaaaggactgtcgaaccgcgatatctccgcgcagttatttatttctgaacacacggtaaaaagccatttgaaaaatattttaagcaagcttcatttagaaaaccgcgtgcagctgacaagctatgcgtttcaaaacggcttaatgaactaacagctttcacgagctgtttttttttgtctgggtagatgtgaaacattctatttttctacaaattatctgaaaactataatgaagttattagcgactggatattgaaagtaagaacgaattcttataggattttttagaagtaagaattaacatataataactacctgggggatgctatgacttttttaagagcgcttttcaaacgaaaatctgtatggtttattttgataggaatcgctgtttttgtctacataaacaatagctctttgttgacaaaaagaagcggacagcctctccttcttgctcatagaggcgtagctcaaacgtttaatataaaaggccttcaaaacgaaacgtgtacagcggaacgcatctacaaacctgagcattcttttttagaaaatacgattccttctatgaaacaagcctttaaagacggagctgacattgtcgagctagacgttcatattacaaaagacaatcagtttgctgtgttccatgactggactcttgattgccggacaaacggaacaggcgtaacacgggattacacgatggccgaattaaaaaagcttgatattgggtacggctacacggcagatggaggaaaaacgcatccttttcgcggcaaaggagtcaaccttatgccttctctagacgaagtgatgaaatactttccgcaccaatcctttcttattcacgtgaaaagcaatgatcctgaagaaggaaaaaaactagcaaagtatttgtcacaactctctagagaacgcttaaaaaccattactgtgtacggaggagacgaaccaattgattcgttaaaaaaagcgatgccccatctaaaagttatgtcaaaagcaacgatgaaatcttgtcttattccgtatatagcaacagggtggaccggatacgtgcctaaagcatgtgaaaacactgaactacatatacctgaaaaaatcggaccttttctgtggggatggccaaaccgctttttaaaccgaatggatcgtatcaatacccgaactgttattgtaggcggaaacggaagcgaattttccactggatttgattctgccaaagacataaaacgccttccggataactattcaggtggaatttggacaaatcgtattgaccgtctaggcccttattataaaaagaaataaatgaaaagcatctgccctttctacgtgaagcagatgcttttttatcaattccctcctcttataagccccaacaatcactctcaggggtgatggctaattctccctttccttctataataaaagcacgttagttagtaaaaaggaggaaaaaatgatgcaggaaaagcgcgaagaatcagcgagtacaactaaaaaaagcacggcgcgttctcaaggtctatacaaagccatatggcgctggcatttttatgcaggtttagtgtttactccgtttcttcttatattagctgttactggcgggatgtatttattcaagcctcaaattgaagaaagactgtaccacgacttgtatcatgttcaagctcaatcacagtctacatccccttcagcgcaagtgcaggctgtaaaggaaaagtatccaggcgctgacgtattgacgtataagcccagtgagcgctccactcgttcttcagaatattaaaacgacaacattgtcgttttaatataatgtaacctcctgaaattgattcgtcaatataaaaacgacaattatgtcgtttttattactatcctttatttccctaaggcacttttttaagattgctgcttttaattataacaaggggaaatttcctttttatagtattgtataaagaaaggcttattcagctaatgggcagtcatgttgaataagacaggatttacttatccttaaataaaatattttcaaaacatcataaaaggaagtgtgtactattggatagtgaaagtaaactcattatttctccattaaataatgacttaatagacgacatcaatatgacaaatgattattttaagttatatggcagagttgtccccagtttgcaatcaggaaagtggtcttataaagaagttctttttgatgaaactagagaaacacgttttccagatgacaaacttgattggagccaatatataaaccgagaggataaagctttgtttttagcttatatgaatactacttgcataggacagattagaataagtaaggattggaatcgcttctgttatattgaaaacattgctactaaaaaagattatagaggcagcggagtcggaaagttgctcttaaataaagcagaagagtgggcaagacaaagaaaacttataggaatgtccttggaagcacaagatgataaccttggtgcatgcagattttatgtaaaacaaggattcatactaggtggagttgacacgctaaagcagtcatataatcctactattagaaccactttatactggtataagttattcaagtaacgggggctttagcggaataagtaatagagtcgttttaacataggaattttaaagagttaaataaatgaaaaaaagatgcttcgcgttttaaacgaagcatcttttttaagtgcagctatgaatgcctacctacttttttaagttaaactgatcgtgaggcagctaatttctcaatcggggcttgttcaatgtctgctgctgaaatattcagcaacttttctaaaacagccgttatgccctcatttgtttcattactttttttgcaatcattaatatgctggtttaattgctttttataagcctcggtatgaatgagccactgacttaaaagctcttttgtcgcctttctttcgtcttcgcttttagctccaaataagctttccatatcaggttcttgaataattagcttactaaaatcgtcgcttgctgcaagccaaaaatagttcttttcgtattcgtaatatctgtgttcttttaataaaaagtagccaatttcaaattcgatgcgatagagcggctggttaactttcggtgcatgaaggcttttaaagttaatatgctctacatcatctacataaacctctaaaccgtattgggttttaatcatcttagcgtctactgtattcatggtgtttacctctttaaggatattatgagagaacgcgtgcattctttttttagaatgcgcacgttctttatcttttacttagttttgaacagcatttttccaatcagccgcaaatttttcaattccttgttcggttaaaggatgtttaacaagctgctcgattactgaatatggaatagttgcaatatgagctccagcaagggctacgcgtgtaacgtggtccggatgtcttacagaagccgcaatgatttgagagtcgatattttgaatgcggaacaactcagcaattttagccacaagctgtacgccgtcttctgaaatatcatcaaggcgaccaaggaatggagatacatatgttgcacctgcacgggctgctaaaagagcttggttcacagtgaaaatcagcgttacgtttgtttttacaccttttttagcaaggtagcgagtcgcttctagtccagcgagtgtcattggaagcttgatcgtaatgttttgatccccgccgttaattttgattaattcttctgcttgggcaatcatgtcttctgctgtttcggcatccggcgtcacttctgctgaaacggattctacttctggaacggtttttaaaatttcttcaatacgatcttcaaactttacgccttcttttgcaacaagagaagggtttgttgtaacaccagataaaacgcccaatttgtatgcttttttaatatcgtcaaggtttgcagtatcaataaaaaatttcattttttcattcctccattagttttttttactatacccagtatttcacttgttatttcttttccacagcatgaccgccaaactcgtttcgaagcgcggaaactacctttcctgtaaaggtatcatcttcaagcgagcgatagcgcattagtaaagacatcgcaataaccggcgtagctgtttgaaggtctaaagccgtttctaccgtccattttccttcaccagaagagttcataactcctttgatgtcgtctagcttagcatctttagagaatgcattttcggttaattccattagccatgaacgaataacagatccattgttccatactctcgccactttttcgtaatcatagtcgaactggcttttttcaagaacttcaaatccttctccgattgcagccatcatgccgtattcaatgccgttatgaaccatttttaaaaagtggccgctccctgcttctccagcgtataggtatccgttttctacagctgtatcgcggaagataggttcaacaatttcccacgcttcacgatctccgccaatcatatagcatgctccgttacgagcgccttccattccgccagatgttccaacgtccataaagcggattttgttttcttttaactcgttatagcgtcgaatagactctttgtaatgagagtttcccgcttcaataacgatatctccttcagttaaaaaaggcgtcacttcactaataacagaatcaacaaccgtatgaggaaccatcagccatacaactcttggtgtttcgagtgactgaacaagctcctgtaagcttgatactcctgacgcaccgtaccctttcatttgctccactgcatttgaatttacgtcaaatgctacaacgtcatgacgctgatccaataagttttgtcctaagttaatccccattttccctaaaccaactaatcctactttcatgtgaacagctccttctatttatctttttatttaagcctttagcaattcttttgcttgtgccactacgttttcttctgtaaatccaaacagcttcatcacatcagctccggttcctgaagcaccaaatgtgtcaacagctaacacttttccttttggccctacaaaacgttcccagccaagtgaaattcccatttctagagaaattcgctttgaaatagattcaggcaagatacgctcttgatactcttttgactgtttgttaaacagctcccagctaggcattgctacaacacgtacagatacattttcacgctctagctgagcttttgcaccgaccgctagtgctacttcagaacctgtggcgatgaaaatcatctccggcttatcgtttgtttcggttaatacgtaagctcccttagctaggtggttgatattttgttttgtttcttcaaatacaggcaagttttgacggctaagcactaaggctacagggccttccgcttgctgaagcgcataagcccaagcgctagctgtttcgtttgcatcagacggacggattacggtaagccctggaattgcacgaagagaagctaaatgttcaacgggctcatgagttggtccatcttctcctactgctatggaatcatgagtaaatacatatgtgaccggcagcttttgcagtgcagctaaacgaatcgctggacgcaagtaatcattaaaaacaaagaatgtgctgacaaacggcttcacacctccgtgaagggccattccattaccggcggctcccattgcatgttcacgtacgccgaaataaatatttcgattaccgaaataaatatttcgattaccgaaatatcctggtgcgtaaggaccgtcttctttaatgtctgtcatcgtagaatgcgataaatcagcgctgcctccaaaaatagatggcacagatttagtgaaataattaatcgcttctccgcttgcaacacgagtcgacatcgctttttctgatggaaatgttaaaatatcattcacttcaattaacgcttcgcctgtgatggcacgttctaattcatcagcgagcatagggtattctttttggtaagaagcaaacagttcgttccactctgcttctgctttcatccctttttcttctagcttttcaaaatgagcttttacttcttctggaacatagaagttttcttcagcttcccagccgtaggcttgttttgttgcttttgcttcttcttctccaagcggattgccgtgtgctttatttgttcctgctacttttggacttccgtagccaataatggttcttacttcgataagcgttggctgttcggtgttttgcttcgctttttcgatggcgcttgtgacttcatctacgtcatttccatcttctacacgcaaatactgccagtttgcagattccgctcttttttggatattttcaccaaacgaaagatttaattccccgtctaacgaaatatcgttggagtcatataaagcgataagcttgccaagcttcatatggccagccatggacatcgcttcataagaaatgccttccatcaagtcaccatcgcctactaatgtatacgtatagtgatcaacgacagggaattttgactggttaaactttgccgctaaatgagcttctgccattgccattccgactgcatttgcaattccttgacctaaaggacctgttgttgcttccacgccgtccgtatggccaaattcaggatgacccggtgttttactgtttaatttgcggaagctctttaaatcttctaccgatacattgtatccacttagatgaagcatgctatacagcaagcttgagccatgaccggctgataagataaaacgatctcggttaaaccagcttgaatttgccggattatgctgtaagtgatttgcccacagcgcataggtcatcggagccgctcccatcggaagcccagggtggcctgaattagctgcgtttaccgcatcaattgacagggtgcgaatcgtattaactgcaagtatgtctatgttggtactcatgtttcatccttctttcgctttgtttgtattaaactagctgcacttcgcgtgattgacttgctgtttcttcatccaaccaccacttaaaaccgtctttttctaaaagtgcatatgatgcgtcagggccgtatgaaccagctgcatatttataaagcggcactgtattttcctcaaacgcttcaagaagcggctgaacccattcccaagctagctctacttctttccaatgagcaaaaaatgtagaatctccggcacatgcatctgcaataagacgctcatatgcttccggcgctccttcttgctgacctgagaaattaatttgtacaggctcaatatgaccatgattaaatggatttttgctgtttaactgcagcgtaatattttcgtgcgggttgatttcaatgatcaacagatttggagatgttgtttctcctttgtctaagtacaactcttttagcgagtctttgaattcaataacaattcgcgtcactttttccgccattcttttccctgtacgaatgtagaaaggaacgcctttccaaagcgaattatcgatatatagtctggctgctaaaaacgtatctgtctgtgaagatggtgagacaccgggctcatttatgtagctcggcactgaagccccgtttatttttccagcctcatattgaccgcgaacaacgtctagatccatctcttcttttacaagcggacgaagtgcttttaacacatttattttttcgtttcgaatgtcatcagcgctaatgcgagccggtaagtgcatagccgtcatcatcagcatttgcagcatatgattttgaaccatatctcgaatcgctcctgaatggtcataatagcttgctctttcctctacgccgaccgtttcacttgctgtaatttgtatattcgcaatatgttcgttattccataatgattgaagaataggattagcgaattccagcgcttctaaattttgtaccatcgacttgccaagatagtggtcaatgcggtaaatctcttcttctttaaacgctttgcttaagttttcgtttaattgacgagctgactgtagatcatggccaaatggtttttcaataattaaccgtttccaaccttttgtagcacctaagccactgtctttaatatgctcggcaatcgtaccgaaaaattctggtgcaacggagagataaaacattcggttgcttggaatatttaattctgcttctcgtgcttctactagatttaacacacttttatagtcttcagcattggttgcatccaattggctgtagcgaaaagctgacagaaaatgctgcataagagatgaatctttttcgacgcgacgtgaaaaagtgtgaatagattcttctacttttttctgaaaatctgcatcggacatctcccttctgcctagtcctacaacagaaattgatttagggattttcccgtctacaaataaattatagagtgcaggataaattttgcgtttcgctaaatcacctgttgaaccgaataaaacaaaagtcatcgcttccatatctcttcctcctgttaggaaaaatataatcttttaaaagtaacttttctttcactcgttactttatgtaacctatcttattcctgaaatattttttcgtcaagatattaatctcgtaaaaaatcatttcaattttctttttttctttaaaccttatagcggcttatctcggttagtttatggaaaaataatgaaaattctttttaggtgaatttagaaaataaaactgctttaatggatttgatagaattgtatgaaagtaaaaacatacataatgtttgcatatgtgccggggaaaaatatcaaaaggtggaagtgctatgaaagctcaacgaatgaagatggttgaaggcctatctatttttcgcgtaaaaaaatcgcagaacactttaaaggagaaagaaagtttgacctctttcttttaagctgcacgcacgcctttaatgcgtagctacagcgagaagcataagcatcatatagaggttaaaaacagctagtaaaacaagagcgatatagactagttttttacctgttttccctaaaaaatagacgtttattaaactaaaatacacgcttgctgtgcataaaacgaacgcaagaaattccttgcactcactgggtttcatttgaaaatctggattatagtaaatttgaagatcgttactaacagcgaagggaacagtccaccacctgattaaaacccctataaacataaatattccgattacatttaatgtaaactgcagcgttctctcctttttcacgcttctttttgtagattctttaaagtttgcccgcatgcatttcccccctgatgtttttaacacagtaactgatttaagcagacctatataaacgttccttcttttaattttatacacgctaggtcttacagatgacatgattgacataagaaaagcttcttccattcataaaggaagaagccttaaataatgagactatattgatcaatgctttagttcacctctgtattcttttctattacagctcttactacgatgactttcccattcccttcgcagcattcccattttgatgctgtcaaaatattcaccgtttacgatacgtgcttctctgattctcgcctcttctttcatgcctatttttgcagctgtttttatcattctgatgttgcctgaccacgtggacataccgagtctatgtaaatgtgtagactcaaataaaaaatcaatccacatgcggtaagcttccgttccgtatcctccgctccaataatctgagtcgtaaatgacaattccggtttccagccagtttgtatgcttgtccatccagtaacagcttacgattcccaccgcttttttgttaatgaggaccgcaaggagtggaggaacccctggaaaaagctcatactcttggttccataagttcatatattcttctttcgtaagctgtttttctggtaagtaaggagcattccacttttttgcttcttggtttttttcttcgtacttccagtaataaagttcattaacgtcttcctgtgtcgcttctcttaatgacactttttctcctattagttttatcatgagaggcatcactccttgatttataataaccatgcagagtaactcatcctgccctacatgtaaaacaccgagaatgaatcctcccggtgtttttctttttcctttatttatgattcacgttttccataaccgcaaaatagttatcttcactatctgaaaagttaaagactcgccctgaaggcatagatacgatttctcccaccgttacgcctttagctgttaaatcactatataattcatccacattttctgtaaaaaacagcagtgaaggagtcccgacatttaattctggctgcatttttgctattcgctgtttgttatgaaggataatggttgtttcggcccccgccaccggcgctagctcaatccacttcatgccttgttcattattttgttcagacataacctgaaatcccattttttctgtccaaaactttaccgcttgatcttgatcgtttacatataccataatttgaccgacttttttaatcattactttcactccttttatatagataaaataatttcttccgctatggtatctgccgactttccctttgtgtagatcgtttgctttgccaatgtgcgattggatggatgttttacaaaatgtttgttaagttcaaaaatatcgttgtcatccgttatttgttgcaatctttgatgcaatatctgtatggactcttctctgtcagcactcggaagcaataaaaacagggagtcgtaaggttttaacgttttttctactagttgaaacagctttatgtcttcatagaccgagtggccggcgccaaaatcaatgaccgcatgcttgtactcttctagtattcttttaacggcataggcttcaaacggcttccaataggcgtacatgccttgaaatccttgtttttctccaatttgttgctgtgtttctttgctgaatcctatttcccggtagtaggaaaatcgcacttcatccattgagcactgaggaatatttagtttggttgccactttttcaccaaccgtcgtttttccagcgcacataggtccaatgagaataatagggatttgcataggctctctccttatttcacttccagcacaaacgcgtacaacgcatctccattagatacatttttttgattttcatccatccaccataccgaatatgagtagtagtaagtgcctgtttttgaaggtgctttcagcttacttttctttagtggtacgtctacttcatttttgttttgtatttgtactatatgcctctcgttaggctgccgcttatgtttgatagtaagcgctagcgattcatttgctttaacttcaataggcttttctgtttttaataattccaaaggtcctgctttatccacacacgtgtttttccagcagtaagtgccagtttttatttcgtaaaggtggtcgtttatttcgagatacacttttggcggggattcttcaagaaatccactgcttgaacatcccgtaatgcttgccatgataagtccaaacgcggttattttccatattctcatcatttcatcacctttttattatttcttcatagctctttcatttcctgtttcttattttcttccttcttaaattacgagacatatgttaatcgttttatttcgctacacgttttttaaagaaatggaatatgaataactaacttatttgctaataagatagtgaacgtatggaggcgccaaaccgatacgacaaatgtatgtacaatgaagaacgcaaaaaagtgctgctcttgacaagagcagcacttttttaaacttgcacgttatttgattctgctaattttccatcttccatccacacaacgcgatcacacaaatctagcattctttggtcatgcgtaaccattacagctgacttgccccttagcttcacttcatctgcaagcatttgcacgaccgctcttcctcgctctgaatccaagcttgccgtcggctcgtctgcaaagataatttcagggttattcatccacgctcttgcaatcgctacccgctggcgttctcctcccgataaactttcaggatagtgatgctttcgatgagcaagccctagtttttcaagcaaatcatccgctctttttttggcttctttgtctcgatttccttctagttccgtgacaagaagcagctgatcgcgaaccgttaaatacggaattaaattagctgattgaaagataaagccgatttttttcaaacggatgctgttcatttgcgctgaagacatgttattaatctcgtctccatcaatcatcacacgtccgccagacggtgaaagcagcgcgcctgcaatggataaaaaggtacttttcccagaaccggaaggaccgacaatagccacaagctctcccgcttttacacgcagcgatagattatttaacacgactacagcgttttctccgtctccaaacgacttgctaacactctctaaaactagtttttcttcactcattacacagccctcccaatcgcttcaaccgcatctacttttgctacgcgatacagcgataataatgaactcagtacagaaacagctacaaacagcgccgaacaccctgcgatcagcgacacgtccaagtggaacggcatggaatccggtaaaatagcagctactccgtatgtcaatccaatactgatagcaagactgcataatgttaacacaaccacttgagataaaatcgtgcgcgctaaatagcttgtttttgctcctatcgcttttaacacgccaaactgattcattttttgaagcgtcatcacgtagaaaaaaacggctaatacaaaagctccaatgataaaaagaaacgcgaccatcattaaaagagagccttgttcttcttgatagccaggaattccttttaacgcttcatctttactaattacattcacgtcagcttcttttttgtgaagatcctgtgcctgctggctgttcatatttaatacaaccgcattaaaagcacctgtgctttcaagcgtagtccattctttcaagttaatatgaatgacgggcgcgtgactaaacgactgattttttgtaaaaccaacaatcctaaagctttttcctgaagccgtgtcttttatcatatcacctagctttactccttcttcttttagcgaagagtccgccacagcttcatgtttcgcatcgtccgtaatcatcttcccttctgttacgttcggagctaaaaagccgcttgtgcttatggcaaaaaacgaggcgtcgatttttttctgttttccttcatttataatggctgtcatcgtgacaccaagcggctcagcatttttcttgccgcttagttgttgaatatcctctgttttgtttgtggataaaacagagcgcgtcaggcgctgatccgcttctttttgaagcacaaagtaatttcctttcatttcttgaacagctgaagcattgtcagaggaaagcccctttgctaagcctgatacaaaaagcacaagccatacaattaacaccataatcacgccaatgagtaagtagcgtaacttcgcatgtttcaattcacgtaaagccaaaaacatgtttctttcatctccttttttaattctatttaaagtataaaaatagaaaatgaatggaagatgaacggctcattacattttcggaagataaacgtgaaaggtgctgccttttcctttttcgctttcaacgtgaatggaacctccgtgcattttgacaatttgctttacaatcgctaagccaagaccgctgcttccttccgtccggcttcttgctttatcttctttataaaaacgattaaaaatatgcgggaggctttcttttgacatgccgattcccgtatcttgaaattccacgtggcaatgcgtgtcttccataccaacgcgaagagacagcgttcctccttcttccgtaaactttacgctgtttgtaatcaaatttgtccacacttgatgaagcagtttttgatcgcctgaaatcatcgttgaaggaagatccatttcaatggccagctctttttcacgccagctccactccgtcataaacagcacttgcttgatttgagctgcaacgtcaaacgtgcttttgtcgatatgctcactttctttatcaagtgaagcaagcgtaagcagctgtttgctgagtgacgacatgcgccggctttcttcttcaataatagacagatactcatttctctgtttatctgaaagatgagcagaacggagcgttttcgaaaacccttgaatggacgccagcggagactgaatttcatgtgacacgttggatacaaattcttggcgcatctcttcaagctgctctaaacttttagccatctcggaaaaatgtgaagcaagcgcgccgatttcgtctcggcgctttacgtacagctcgacgttgtattttccttttgccacttgttttgtcgcttcggttagcttgacaattggttttactaaataacgcgtgctaataagtacaaataaaatacttaatacaatcatcagcagtaaaataattgagaaaaaaatgcgcatttccccgaactgcagctgaatatcagggcggataaacagcgcttgctgcttgttactttctccttttaacggcacgccgatggtattggctaacacattatcaaaaaaccccgtcacaaacacctgtgaaggaaagtttgcaattccgtgatacattttgccatctaacacttgtttgacggcactcttttctaatcgctgatttctaaactcccgtccgtaaaacgtctcatgtcgggtgctgtccactacatatatttgatagcccaatttactaatatgctgtaaataagcttgttgatccacgcctctattgctttcgtaaaagctcgcaatgtcttttgccatacgggtaagcttttgatcgttataaggttttaagctgtactgataataaacgtttgctagaataaacgcgaggagactgctaaataccattacagcaatggttgtcaggacaatccgcaaatagagcgtcttcattttgcggtcacctcaagcttatagccgactcctcgaaccgtcgtaatgacaaaatcatcggtatgttcaaacctttcgcgcagccttttcacgtgtacatcgattgtgcggttatctccgttaaaatccgctccccatatcagatgaattaattcttctcttgtgaaaattcttcctggatagctcgcaagctgagctaataattcaaattctttcattggaagaattaacagtcgcccgctgcagtgcacttcatagctttttcggtcgatagaggtgttgttcagcacgatcattttttcatttaccacttcgtaccggcgaagcagtgctttgattcggaaaatcaattcttttggttcaaacggctttgtcacatagtcatctgttcctgctaaaaagcctttttctttgtcttccagctgatcttttgctgttaataaaataatgggaaaatcataatagctgcgtatttcttcgcaaacttcatatccgtctttatgaggcatcataatatcgacaaccgctaaatgaatgtgctgcttagcaagcagacccgaagcttcctctccgtcttttgcttcatgaaccacatagccttcaagctgcaaatagtgacgaactaattgccgcatatgctcatcgtcatccgccagtaaaatgtgaatcatttcttctgccactccttttatcaaccatttaaaatggcggccttttggccgccatcacttattctttcagtatctatctgtttactagtgtaaccaaacgccgtggtcctattgcgtttttattaggataaggacttattatgaacaggagatgaacggcttgttacaaaatccattcaccgcgcgcaatcatctctacttttccgcctacttgaatgtgaaaagcttctccatcataactagcttttacatacagcagtgaaggtcttcctatttcgtacccttgttctacacatatgtcaatagcttgctgattaaaataacggtatttaactaaatatgctgctaaacagccgttggcgctgccggttgctgcatcttctggcacgccgtagtagtcggcaaaatctcgtacgtttaagtggtgatcttggtgaaaagtttccggcgaaaagaccataatcgctttcgcttctgtattttctatcagtttgaaatatttttctttgtctacatttatttctttagctgcttctaatgatgttaacgggacaaggatgaccggcagaccggtggatacttcttgaacgggaaaacgcgtgtcgatataaacttcatcaaggtttaacacgtccgccacttgctttttatctaacactttcccaaacgtcggctgaccttgtgtcatccatagtacatctatttgttcgtcatatgtaacgggcgtaggacctgctttataatgaagaataagctcctctgtatctttttcttttaattcttctcggataacataagcggtaccgagcgtcggatggcctgcaaatggcacttcttcattaggtgtaaaaatccgcacgttatattctccttttgcagaagcagacgtgataaacgtcgtttcagaaaaattaatttctttagccatttgctgcatctctttgtctgaaagtcttcctgcgtctttaaaaacagcgagctgatttcccgtatattttctctgtgcaaatacatcaacaatggaatactgaatacttttcatttatgtgttcctttctaaagcaaattttcatgtataaaataggtcattacgtttttctttaaagcctcatattgctctttattcgtatccataaacgcttcttcccgactggataaaatgtctgcataatggagaggctcgcgaaattgttcttgtgtaaaatcatagcgcttttcatcaagctgattatagaaatgccatccttctttacacggagtttttaaaatatatcctcctttgatatcttgaacgacaagagctgtcacgccgcactgtcccttagaaggattgtcagccgtccacttcgtgcttgaatgaattgaccacgattggtgtagggctttctttaaatgattcacgtttaagcacctcctttttcttcaaatctaccatattcttcttttttatgaaacttcttgttgaaaaacccatagcacaaatattcttactttaaaaataatttaaggaagaatagaaaaatactagaaataatgtataataatagagtcattttagatgatagattataaccaatgaaaggtgttttaaatggaagaacaagcagtaaatgaactcatgccttttgaagaagagcataaagtagttcgaacaaatacgtcctattatgatttgaagtggggaaaaacagctaatccagctaaaaacaacacgtggaactgggcagccttttttctgacaagcgcttggtttgcatatcgaaaaatgtataagcacttttttattttaacgcttattgaggtaatttggttttcccttttatgctttgtagacataccagagtggtccgatgcaattgtgttcggcggtgcttcacttattacagggctatgtgccaatcgctggtattataagcacgttaaaaacgtgttagctcaagccgaagctcagcgggagcagcggaaagaagcttatctgcaaataaaaggcggcactcacatcggaattgctattggtttaagcagcttagcgcttgtgattacttttggagtcggagcgggattatcacttttaccaacaaaaacgaatattaaagatgtagttcgctacggcgacgaagcaattacgcttgaaacgtacaacgatcatccaaaatggacctatattaaaaaagatggccgtcatcacgttgtacaatttaccggctacgattatacagaaaaagaacatgtacgcattgtgtttaacgtttatttggataaacaaatttacgagtgggacaaaatttacatcaacggcaaaaagttaaataaaaaagatgcggaagactatgaatactggattgaagacagttcagcatattaaaaaggtcagcaaaaaagaaaggatgagtgcttgctctcctttcttttttgttttatcttaaatcgtcaaaggcagcttcaccgtcactactgtcccgttctcatcactttcaatcgcaagcttaccgttatgctcgttgatgatcgttttacaaatagaaagccctaaccccatgcctgttccatcttttgttgagaaaaatggatttcctactttattaataatggatagcggaatgccagagccggtatcttgaatgtcaataatagcccaaccttcccattctttaataataagatttacttccccgcgtttctttttctccattgcttcaatggcgtttttcaaaagattcataaacacttgtctcatttgagcaggatcgattgagacaagcggaatggctccttctattcttacgttcatttcgacattatacagcgcagcttcacttttcaagaaagcaacggtatcatgaataacttctacaatcgatacgatttcttttttgggcgctgttggctgcgtgacaagcaagaagttgttaataagttcattcatacgatccagttcatcaagaacaattttttgaaaaggctccgcctgttcattttcattaaatagaaattgaataaagccgcgcaccgactgcatcgggtttcgaatctcatgcgctaaccctgctgctagctgccctacgagcgccagtttatcaagctgcagaattttctcttcaattttcggcaaaacagccgcttgatttttataaataatatgagacaaaataccagccagccggtttaacccttgaatttcactttcgctaaactgataaggatccggatcgaccgcacatagggtaccaaacattctcccgtcttctagcacaataggtgttcctaaataagaacctacccgggcaccatcaatgatggctaaattagacgttctaacatcgcgttttgtattgggaataacaaggggttcatcacatgtgactaagttgcataccgcaagttctaacggcagcgtcagtccatcctctacaaggcttcccccttctttattaaaggctttcataactgaaaattgttcgtcgaaaatccctacaaacagcgtcctgcttccgactacttcgctagccatctgcaatacatcccaaacggctttttcattgatgttcctctcttccattaccttagtcacctactatttaaatatagactgttctattctcttattctcattataaattttaaatccgaaaacgtatatcaaaattttaagaactcgtttatttcttctatttcatcgttagggttaagggtagccaagacttgatggtcctcccatatgccgttaatatttacattttttctagctattccttccctatgaaaccctgctttttcaagtactcgctgagaaggcatattacgaggcatgacaccggcttcaatgcggtgaagattcagctcttcgaacgcatagccaacaagtgcttttacggcttctgttgcgtacccttttccattatgatgctgatctagaaaatagccgataaacgcgctttgtaaagattcgcgcatcacttgaaaaagactaatggtgccaattaacttattattctctttttgaaaaagaccaaaatagtattcttcatcgtttttcctcttctcttcgtgacgctgaattttttctacttggctctctaacgtataaaaagagtcctctcgaaccatagaaaactgttcaaaaaagccgcgattgtccttttgcaactgaaggctgtcgtgcgcatcgctgacagttaacgggcgtaaataaatagcgtgaccctctatcatactatgtctctcctctacttcaagaaatgtatgtaaaaaaaagaaggcttttttaaaaaccttccattttctcacatattaaacttttcttgtttgaatgtaaagttctaaatcactgcttttcttcgttgtgatatgttctgctatgattttagctagcaccatattatacaccgttccgttatctccatatccgcttagaaagtaacagttaggcatttcgtcatatattccgatgaggggaaggccgtcatgagtgcctccgtaataagcgcttatgtaataatcagcttcgacttgaagatgaggaaaaagcttattgaactcttttaaaagtttgtctcttttatgaacgagtttagcatcacgttcttgcggcacaatcgtgttttcatcaagaccgcctataatgactcgattatcggaagttgttctcatgtaaatatacggtcgagctgtttcccaaattaaatttcgatttttccatcctgtaaaatcctttacaggagtcgtaacgatagcataggaacttgtgagtacagcttttttctccctcttaaattcttgattttcatagcctcctgccataatgacatgtttagctttgatttgtgatttatttttagtaaaaaatacagcttcatctttttctaacttttgaccgacaatttctgtttcttcaaacatccgaaccccatgctgttttccatactctaacagaccgagtgtgaagctgtaaggattcagctctgcatcatttttaataagcattgccattcgttttttaaatccatagtctttttcaatttgttcttctgataagatttcagcttcaaatccatgcttttgcatataaaagtagtctttatttatcttcgtgatatcttcttcataacttgcataatacaagctgtctcttcttataaattctgcattaatcggaagttttttagctgcttcctcaatatctgtaatagcctgttcacacagcttataatgacggactgttttttcttctccaaacgtgttgactaattcgtaaaacaatttatctcctaaatattgaataagagaggtatttacaattgtacttccatgccctgctttacgtttatcaacaaccacaacatcaagcccctgctcacataaatagtaagcacattgtgcacctgaacttcctcctccaataataagaacatcacactcaatatcttcctctagagatgggtatacaggcggcttcgctacagttgtttgccaataagggtttccagataacaaatccatgcaaacgtctcctttcttctctgtattatgcccaatataagctaatttttgcatgcagcagtgtgaaagtatgtgggttaagctttttgaggatagtaagcaggtgattaaagaagccattcattaaaactaatcttctatacaatagaagtaatcatgactcttaataccatgagcatataaagtccgtgactaaagtattgataaacatcatgtcgtgatcttctgctttagacacagacccccagtaagtgcgtaaatatataacttcttcactacataaaaaattccacgcaaaaaccacctggaaactcaccagatggttttttatattaagtggggtgcacgctctgattaactgtggatggatataaagccttacgttccaaaacagacttctttatagaaaagaatgatgtgaaaatatttcttctgggattttccttttacttgcgtttaacagccgcagccaaagccatagccgccgtatccgccgtagcctccatacgggtaaccaccgtaaccgtaaccgtagccgccatagccatatggtgataacagtgagcctgctactagccctcctgctaatcctcctaaaaatggacctccaaagccaaagccgaacggtctgccaaagccaaacgggcgtccgaaaccaaacggtctgccaaagccaaacggtctgccaataaacctttcatctgcttgttgaagttgatgatgatcttgagaatacatagtaggtaaaaaatgcatttctgaattcataagagaaacctccgtttttttgtttttgctttcacccatgaatatgcatttacctattcgctgtcttgggcaaatatcttggttatgctgaaaataagggaaaagaattacgaaaaaaagaaaattactaggtttatatgaaaatgagcttgatttctctttagtacctaatacatacaaaaagaagcggatcctgacttagaatggtatagggaaagtactaacgtgtttatttcatagtaaaaaataagaagccgaagaaaaaattcttcggcttctccttcattatgtacgcaggctaaggaggaagtggtgttagcctgcttcgttataacatgggggctcatatatgagatcttgggatgattcatcctatgtagaaagtgaaaaaaagtaccgtgtccatcttattttcttatctttttttattttcattaaaatcattggatatttttggagcacttttgcatttcaggcatatgttaaaaatgtactcagaacttggaggtgaaatatatgggcttctatggtggctgtggttatggcggttacggttacggcggcggctgcgggtttggcagtggctttgctttaatcatcgtattattcattttattaatcatcatcggctgtgcttgctggggaggatttggcggttgctaatcattagaaatagtgatgaacagcttcatttccgctaattttttcaccaaaagctagctttccgctttattatgaaaaagcagtgtccacataatgggcactgttttcaaatgtgcttatgaaccaggtcataataagactagccattataaaaaaatagacttttttaatctgccgtttcttgtctatttcttcccatcaccttatttttcttgttcatacttccttttcttctacatattaatagataaaaagattaattaaaaagagagtcactctgcaactctcttcctgctctatgtagatactaaacattaaacaaacgtttttttcaagacaacgcgctgatcattgacagtatagccgtttctttcataaaaagcctgtgcagctcctccagtcgccgtcaagagatacaagctgttgatatcgtgtctttgaagttcgttctcaaaccggcttaagatagctgaaccgtacccttttccctgcgcgcttgcactgacgcaaagctcggccacgtaaaaggtcataccgctgtatgatttttttgcgtgacctgcaatcattccaatcaactctccttggtcataaaataaatagcccataaatttaggtgtgttcagtaaatcagtcagcctttctctagctgatttctctgtccacggctcattccaaggtttttttgtaaatacattcatatacaagttaatgcactgctgcatattctctgcagtgagaggtactacttttccgatcatttttacgcttccttttttgtttagtttgaaggcttgttaacaattcgctcgtacatttccggcaggtgcttaattttataatcaatcgtctcaagcttatgatggatttcttcgatttctttttgcactgcttttttatgatccaccagcatttgcagacttttatcaagcacggcattttcaagcgtacagttttcaataagcgtccgaatgtccttgatttgcatacctgtgctttttaaacagcagattaaatcaatccattcaatatcttgttctttaaaaatacgattccctgacgctgtacgatctaaaaatggaaaaagcccttctttatcataatagcgaatggtataaattgtcacgttcaatttttttgccacttgtgaaatggtatacgtcatactgcttcctcctacaccttaaacttttcagaaaaacatgatgagtttgtcttgacctctagttatctcgaggatttattgttttatagtcttcttcattacgctctttatgctgcaggttttttgtacaagcagcaacatatatttaaacccgaaaggatgaatacgatgaatactgctcacatgatgcttaccattgtaattggcggttttattgcctttttgttaggtcttggcgttacaaaaataattgagctgctgctaaattattttctagcttaaccagtagttacttatcgtaaaacgcaggtaactccgttccatatccgaacggagttacctgctttattttaagaactgcagctcttaaggcaccatgttgccagcggctttataaatatcgtaccactcttcgcgcgttaacttgatttctgaacctttacttgcatctttcatacgctgaatatttgtagtaccaagcaccacttgaatatttgcaggatgagttgtgatccacgcaacggcgatcgctgtattcgtcacgctatacttacttgcgatgcgatcaatcacttcgtttagctttccaaatttctctttgtcgcctaggaaaggtccttcgaaaaatccgttttggaatggcgaccacgcttgaagcgttatatcatttaaacggcaatattcaagcacgctgctgtcgcggttcacagcttggtcgatgcccatatttaaagaaataccagagtctataattggcgtatgtgcaatgctgaactgcacttggtttacgacaagcttttggttgatatatttttcaagcagctgaatttgcgctgggttgtggttcgacacaccgaagtgacgtacctttccgctgctttgaagttcattaaacgcttctgctacttcttcaggatccattaatggatctgggcgatgaagtaataaaagatctaagtaatctgtttttaaacgctctaagctgccgttaacagagtctatgatatgcttctttgaaaagtcatagtaatttttcgctgcgttaatgccgcatttactttgaatcaccattttctcacgaagacttgaattcatttgtatagcgtttgcaaaatactcttcgcattgtcccacataatcaggaccgtaaatatcagcatggtcaaaaaagttaatttcttcttccatcgctgtgcggattagcttctctgcttcttgtaaagaaagctctgttaaacgcatatttcccataatcaaatttgatacgtgtaagtcagtattagcaattgtatgatacttcatataaagcccctccttgaaatgatactactacaagataaaccatagagttaactctaggtcaagcagaaagaataaaagattttataagcagcgacggtaaaacaccctatcttttttggtaaaaagatgaaatactaggttgtggtgtgataaaagtcactgccgctctgcatttcatttagtagtatatgttacgttcttttcttcctttttatcgaagcttatttcatagtaatacatcaatttatcaggcaaaggagcttatcaaacactatgcagaaaacgaaagcaaaacgatttgaaatacagtattccgttctaaaagatgaagccaaaatcaaaggaacttttgtgatagaatctgctaaaaaccgagatgacgcatcaagacttgctaaattaaatgtctctacaaaagaaagagtgtttattcaatatgtaaagattttgaaagtcaaacgagtttctacagattcggcggcaaagtgacattggtttgcttctttttttagcaagcccctatttatgctgaaagtgtcgtcttagatgatgcttgtttcgttcgtgtgagtaatagaactaatccaataatacaagctgtgcctatccattgatagaaaccaaaaggttctttcagccaaacaacggttgtaataaccgcggctaaaggctctaaacttccaagcaaactcgtttctttaggtaaaagactttgcaggctttctacataaaaccaaaaagcaagcatcgtgccaaaaataatgacaaataaaatatatccgcaggttattggtgataagcttgacgcttcccaaggaggatgaataaagctcattacgcttcccccaattaccattgaccagccaacgatgacaagcgaactgtactttttgatcagcggcacggcatacagcgtataaaatgctgctgctccacctgacagcactccccaaacaacggcagatacaggaacagacagctgagaaatagagccgtttgttaataaaaaaaagcagccccccagcgccagcaaaacagtgatgacgtcttgtcgcgtaaatatagactgcttgcgcaaaagcaaataaatgataatcatcaccggtgataaatactgcagcagcgtagctactgctgcatttccatgctcaatagaagccatatacgtatactgaacggcgagcataccaactatggaaaaaacgacgagctgaaaagctgattttctgtttttccatactccaaatacgtgagaacgattactttttatacatgaaatcattagcagcaaaaaacccgcaatgagcagccggactgaaacaagccagtctacactgatttcaaattcttgaaaaagcttttgagcaaccgtccctcccatcccccaacatatagctccagttgtggcaaagaagaaccctttttttcggctgagattgttcatcttccatccctcactttcagtataagaatagtgttataataagtgaaaaacggggcaaaaaatacgcatattgcattaaaaaatataaatatattgaggtgaccatgtatgccagcagcccattttaaaattgatgaaaacttaaaagagctaacgacccatcgcaccgttgagctgccagtagcatgttatcaaacgacgatcagtgatcatataaacggctacatccctcttcactggcatgatgagcttcaatttgtattagttataaaaggagatgcgtcttttcaaataaatgaaaaaacagtgactgtaaaacaaggctacggactgtttattaacagcggatgtcttcatatgactgaagatataaacaaatccggctgcgtgtacatttgtttaaatgtttctcctcattttcttgtgccgcaagagctttttacaaattacgtttatccctacattcatgcaacgaatctatcacatttattcatcagtccaaagcaatcctggggaaataacgtgttagagtctatacataagatacacacatggattcataagcagccgcaccactatgaaatagagattgcctctgaactcagcatactgtggaaaaatttaattcttaacgggttgcagctgaaatacaatgaaaaagaaatgatcaaaaatcagcggatgaagcaaatgctcaattggattcatttgcactttgctgaaaagattacacttgatgatattgccaaagccggacaattgagccgttctgaatgctgtcgatattttaagaaaatgttaaaaaaatcgcctttgacctatgtattaaactatcgaattcagcaaagcctagttatgctgcagcaagcagaagcaaatgtgacggacgtcgcttatcaagtagggtttaatagtacaagctattttattaatcagtttcgaaaagaaatgaagatgactccgctcatgtatcgaaaaaagaagctgcacatttcatcacatcactaaaaaacggcggagcaatcaccccgccgttttttatgaactctttttactcgttgattttgcatcagaaatctttcctaagaaaaacccgtctacttctgctattttccctctccaaaagatctttcctttagaaggagtagatttactgtctccacagtaaatctttgtatttttcaaatgaataaaatgggcttctgcttctccgtttgattcgctcgcttcgcttgctaaagagaattgttcgcttagcgcctgagccacttcgctgccttcttcaaacgtttcgcttaagtaatcaaagtattcttttgctgaaatcatggtaccggaaatcacagcgccgtttacatttaatgaaatatcaagtgaaaagccatgtttattagaagctttcacaaagtattcaagcgtattgtctttagttgaaaaagaagggcctgtactcatgtctttctttcctcctttacgccttaggctgttgtgtcgtcttcactagaaagagatgttgcgtcatcatcttcttcatccgtgtttttctttgcttttgtattttttgattttttagctgttgacttttttggcttcgcttcctttttttcttcttcgttttcatcttcgtcgtcttcttctgtttttacttttttattttttttgtttgagcgagaatcttcctcttcttcctcgctgtcttcgtcactttcttcttcctcttcttgctcagcttcttttttatcctttttacgaggcttagatgtttcttcttcgttttcatcgtcctgctcgttttcttcgttttcttcgttctcttcttcgtcggaatctgtatcttccgtttcttggtcttgatttttattgaggctaagctcaacaagcatgttcattttttcttcaagctgtgataagcgatcttgaagagtttgattttcttcttttaactcgtcgtactcttgaacgttatcgtcttctgtttcgctactagaagaatttacgttttcttcatcatcttttgatttatctttatcttttttaaacaagcttcccgcagatgttttcaggctggccacactgctttttgatttttcttttacctttgttcctaaatcagatgctttgctttttaattcgtctgtatcaatgcggtcaaggagactttttcgattttcaggagtcgatacatatccaatcgttgcaccgatgatgcctcctgctaccgctcgtttgattggcccgctgcttgttgttttgcttgcttttgaaccgttcttttcttttgaaccgttttccgtatttttattttccttgttttctgcctgtgtgttatctaattttgtttcagttgccattgtaaatccctccattttttaagtagcatacagtttttaacgtttcgtttccattttttcttcaagcgtttttaaccgctcatgcagcattttattttcttcttcgagcgctttgttattggctccttttgaactgagatagggatcattttcccaccagtccatgccgatttcttttgctttatcaaccgaagccacaatcaagcggatctttatcgttaatagctcgacatctgcaattcctacggtgatgtcccccgctatgacgactcctttatccaaaatcttttcgagcacatctacaatcgtacttgactgcatattatgttcgactgccatactgttcctcctaatgaccgcttaaagcaggctgcctagcggtccaagatcaatatttaaatcttctgcgtccagaccgaacacctctttcaactcgtccattttttcttctaagttcattagtgcaattcctaagttttcaatttgttcgtccgtcaacgttccaccctccacccgcctcatggcatgacgttcaacgatttgcctcaatagctcaataactgtcatcacaagctgcgctaagccttgttcagcttgatcaggatccaagtggattcgtccatttgcttggctgaccggttgcatccattaattcctccttttgtttatcaaattgttcagaagtgattggtttgcgatttccttcttttgcttgcaccagcgtttcaaccgaagaaataagcacccgcaaatccaaatacactaaatcgatgccggctatggaaatgattaagtctcctttaatggcgactcctttatctaaaatgacatctaaaatatcaatgagagcaatatctttattctccatggattctttaagagacataatgttaattcctcactttacgcaaagctcgagaaatgatagggcggccatggtcccgtcacttcaaatttccagcctttattttcaagcttttgctgaagctcttctatttcggttacaaacttagtgatctgcaaagacgggagaagaaacacgctgttccacgccatctgtccagctgcgcccgttacgtccttgctccaattctttttaacagagtcataaagcgataattctttaagcttgtcatgtatctcttcacacactttatttttgtgaagttctaattctctttcaatcagctgatctatttttttcttttcaaaaaactgtcttcctggtgataagtgactaatttcttcttttttcgctttcacgctttcattcgtttcgctgattccttttttaagctccgtatcatcacagtaaatcttcacgttccactcttcatttccttgaagcagcgtcagtgaattctctatcttttctttgttaatctcaatagctgcctgcagactttcttcacctttataaatggtacaaaattttaatggaatgatcgtaaattcttcgtacaaagcggctaccgtctcgtgatgatgaaatgctttttcctgcagccagctcatatcctgctccattttttcttgaatcactttttctgaataggtgtcagcatccagtttagaaacgacagccgtcacctgatcaaatgcaattgggtacagtgaatgttctccgtcaaaccctttataagatggaaacggctctatggctgctgcttcttttgttggaattaaaccgtataaatacagtaattctcccatctaggattcctcatttcttttttttgttagctcttcccattgttcaatttctctgcgcttcgcaatttcgtacctcattaacagttcatcttctttttcttgaaacgcttcttccggaatttcaccaagctcaaacatcatttgaagctgaatgagtttttgctgaatcgtcggaaggtcatataactgtttatcagcttcttcctgtactttctcgccgattttcactacaaggttaataggtgcggttactaatttgtgaagcacgttatttctcttctacttttaggcgaatgttcacaaaattataagcaggccaaggaccgctgtaatgaaaatcggctttgtctttccagttttcatgcgcttcattcactttttcatcaaacttcgcttcatcttctcggttaattaagaaagacgcgttcaaaagcatcgtttcgcccgttggctcatttgcttttgctgcttccgctgcttcttcaagcggtgaaaacacatctgttttgacttctttttgcagggaagtaaacatcttttgagccattcctccaagctgaatacgctcataataaccggctgcttctgattttccttttacggatgctgatactttttcaagttcaggattttcgtttacttttttctcaagccattcttttttcccaattacttttaaaccgacttcaatttttcctttgattgctggaaacagcttttcaaactgcggataaaggttttccaaaagaacttttacgtcttcttttgatttgaatacattcccaaagctgattggaataaccgtatcgttcttgtccataatcgctgctactgcgttttgatgcattaataaattttggcgattgggatgataaattttcatcggtacttcagctgctaccatagctgcgtctttgtagcgaatcaaaaatgtttcagcttttgttccttctacttctaccgatccaaattcttcgtctttatccgtttgaatggcgctaaaaatataaatacctgtttcgtttgtttcactcatgttttcaagctcctttacttttcttccgtgtctatattcttacactcttctaaaatgattttttcggctttgctttttgcattttcttcatccaaacatttggtaagcggatgatgcaaaatatccatacataacgtttgaaaatcttcgtcatttccatcgatagcaatgtcttgctgcgtggcgagagtagcgatcataagcgaagcccgaaggctaagtccgctgctgttttcgtctccagagcggtttcgcacgtttgctacgagcgttacaattgtgcgcgcttcgtcttcttctacgtccgttttctccgttaaaatcgctgtctctctgtcgatgtctttataatcaataaacatggtaattaacctatcaagaagcgcatcttgcgtatcgtatacgccggcatactcagctggattgcttgtgaagatgacgcgaaaatcagggtgcacgcgcacaaaaggatcggtcattttcactccatacagcggaagcacgccttcttctaatattgatagaaagatattattcgttgcaggcttagaccgagtaaattcgtcgtaaatcagcgtatagccattttttacagcttcaagcaatcggccatcctgccagttttcactcacttgttcatcttttttatagacagaacgaacatactgatcgattacttttttgctcgtgtatcccgtaaaatcgccaattaaatctttattgttgagctcgtgattcccgtgcatcagcattacaggacgctttctctttttagcaagcgctcgcgctaaagaggttttgcctccgccggcaggacctgtaaaatgaatggaatagccggacttcaaatagctcagcgctcttgaaagaacctcttttgtctcgtcatcttgtataaaagctccactgccttttttccttttgtctgttaagacggtcatttttacgttcctcctgccatcttatcgtttatgcttcaatgccaatggcgcttctatatctgacgtcgagtcgtttgaatgaaatgacttctttttctttatttaaaaagcactcgtacgttccgagcatttcatctttggcgtattttttcatatattctcgttcttcaatgacttcaacaataactctccagccttcatcttcagtagcttccaccgaggtaattttatgaggaggagctacgtgttcaccgaaaaagtcgttcacggcttgcataatttttttaatttccatttttagtagcctccaatagttagatctaaaagctggaaccaccctcaaaaaaggaaggttccatatcacttcatattaaatactaaaacgcggctgtccttcacttgaatttgaacgttcaggaagaccgttttcttctacgtcgtcacgcagaagccctactgcttctgcgtagcgtaaccatgtatcaacactggcaataaccactcgtgcttcaatcgttaaaatctcaattcctacaacagaaactcttgcaaaagcatcaataacaattcctttatctaaaatacggtcaatgacttctgctaaacttgaactattagtacttttttgaatagacatatctcatttctcctttcgcttatgagcccattgtttttaaatctgtagatgatttaatatcattggaacttttaatcttagtagagcttttaatatccgttgcttttttaatctgatttgcgccttttattttccgcttattttttgacttctctttatcgtctgaagaagaaactttttcttgaaagttttctccagcttctttcacatcgctaagcttctcttttactgatagtaagacgtcttggagcttttcttttgcgtcttcccctttgccgtgtaccttttgggcatttttctcttttgtttcctgcagtttttctgatgcttcatttgctttttcctgcagttttccttcagttttttcgacaaatttttctttcgctttttctttaaccttttcttctaccttttccttaacaggttcaggtgtatgatcgatgatcttttttcctgcttttaaggctgctttctccacatcttttttatccatgaaattccccttaaggacggatatcctacttcttcgcgtccatgagtttgtttagcatctcttcaatgcgctgcagctggtcgttcatatttttattttcttcttttagctcttcgtactgagacgtttccatttctgcgctttggctgacttcttcctgcgcatttccctgttcatttgatgcatcttcttttttctttttaggtgccagcagcttgcttaaattgtctttttcaagatagcctgtagccgtctgtcttaatgctcccatcgcttgctgcgttagaatatcctgtgcgtttcttcttaactcttgtcctgtcgcacgtacaatttctgattgtcctaagcggctgagtacttttttactcgtttgaggacttgaaagaagtccaattcccgctcctactacgcctcctaaaatagcaagatttaaagagttttgcgttttttcttcctgttgctgattttcttgtttttcattttgatcagttgttgtcatgttccatcctcttttctcttattattatttatttaatgaatcttctaatgattaaaagacttaaaagctaagccctgctcctcgctcctctgttcggccaggcagcccttcttcctctactttgtcggttaataacccgacggcttctgcatagcgaagccacgtatcaacacttgcaataacgactcgtgcttcaatcgttaaaatttcaattcctacgagtgatactcgggcaaaagcatcgatgacaatccctttgtcgagaattcgatcaatcacttctgctaaactagaactatctgtacttttttgaatactcattttagcagctcctttcgaaatttagctaaatgaatgatgctactaatcaaccttcttaactttttaagtaaacatacttttgaaatatactttttagctctctttcaaacatgaataatttgctaaaaagtaattcctgaaaataaattagaaaattattctactacgtataataattaacagttaattattggatgaaatttgcgcttaaatccttctgttaaagcattcatcaagatttcaatcccaaaataaaacaataaatacattattgttacaataatattacattataatttaaggcatattattattcgatacaccatgacgtattttgatatttttaactattatggaatattattgttagattagtgtatttaaatcagtgcataaaaaaatctgccgcactgcgacagatttctcctccatatcatacgttctataaaatcattccggttaaaggagctttcgggtttccatcatgatctgagtcttctttgtctactaaaacaagcaagctgccttctttgactgaatcattatattgttcggcctgctgttttggaattcccatacttactaaaataccagacagacctcctacgctcgcaccagctgccgcacctgttaatgtagctacaatcggaccagccgccacaaatggacctattcctggtatggcaagagccccggcacctgctaatattccggtcaagctccctagcgcacctccggtaagtgctccagttgctgccccttctgcttttgtattcgtttctttctgaacttttttggtctttttatgtttgccgatgatagatatttcttctgatgcgtatccttcttttttcaaactctctacagcttgaattgcttcttgttccgtttcgtatacccccacaacattctttgcttttgcttccatactatctcctcctcattaatgttgtgtgtacccgggagtatggctttgaaacgttttagaggataagaggtcttctctattcttaaataaatagccctaaatcactttttatttagtgacgtttttatttaaaaatgaataaactcgctcttttttaaccatattcctccacaagcaatgaagcatgcaaccgtactaaaagccaacgcgtagctccggagccaatctacaaggagcccgaaccaaattggtgcgagcacgatggcaaattgattgagcgttaacgcaatgcttaccgttaaaccaataaaacgatcatccgctttttctgctattagcacgataaacaaactaaaccagccaattgcaaaaaaaccgaggctaaaacaaactgcagttagtagccaaaaaggcaaagtaaatccaatataagaaatagctattattagtcctgcagctatccaaaccgtcacttgcaaaggagttcttcgatttccgttatacacataatcacttacccaagctaaaacaattctccccaccattccgcctaacagtgtgatgctcagcatgatgccagctgaagcaaaatccatctttatggctttcgttaaatagctcataaagtgcgcaacgagaatcatttgaagagaaatcattgaaacacctacaaaaaacagcggatagagcgttttatcttgagaaatgcccttgattttttgacgaagtgtaaatgtttcctttttttctgacgatgatgattgctctcggtagaatacaaaaaaaagaaggcctcctccgatagctgccgctgcctgtacgagaacagccccatgccatccgtattgataaaacagcagcggtaatgctgctaaagcgacagcgcctccaatgggtattcccgtttgccgaatccccatggcaaggcctctatgatgagaaggaaaccacttcaccactgctttgcttcctcctggctgtgctgttccataccacacgcctgctgcgagaagtacgcctgttagatacaaataatgatcagcgctataggcaaaaagcatgcttatccccagcaaaatagatcctcctcctacaagccacctttctccatattgatccatccagttcccaaaaagcagcatggaaaaaatcgggccaatttgaacagatgatacgagcagtcctgtttgaaactgcgataaatcatatagtctttgccaaaacgctgccaacggtcctaccccgtacgtgacaaatgttgcacatgcctgagaaagagtggcaacaaataaaatcatccacttataagaagctttttgtctgctcattttctctcctccacttctactttcagtgtagagaaggaatagtatcatgtaaaataagtaataaagataaaagtcatcaataaaaatgatagctgaaggaggagattttatggatataaaagatttacttgtttttacaacggtagcagaagaaaaaaatatttcaaaggcagccaaaatcttaagctacgtgcagtcgaatgtgacgatgcgaattcagcaattagaagcggaactgggtacacagctcttccaacgaagcggtaaaggggtaacgttaacttccagcggagagctgttgcatcgttatgctgaacaaattcttcgtttaaccaatgaagccacggcaactgtgcaaagcagctcgcacacgccgataggacctttaaaaataggtgcaactgaatccaccgcggctcttcggctaccgcctttgctttctacttattgcactgcctatccggatgtagacttcattttagaaacacatacaaccgatgttcttattcacctggttttaacccgaaaacttgaaggcgcatttgttgcaggcagctgtgcacatcctgatctaaactctttatttactcgagatgaagagcttgtacttgtgagccggcatcctcttccttctctttacagcctaaacgatatgaacctattagctttcagcagcggatgcgcatatcgacatacgttagaaatgctgttgacaaaagaaggcgtatttccaaaacgcatattagaatttggtacgattgaagccattattgggtgtgtaaaagcaggtatgggcttagctgtaatgatgaaatctattgtatctaactataatcattcattaacgttaactccgctgccgcagccatatagaaaggttcctactttttttattacgcgaaaagatgcctttatatcggcggctttacgtgaattttcttctattctgactgaacagctttgcacaacaaaaccctaagaaaataggcgttcttagggttttgacttaagcagcggcgggattcttcttaacaaatttcataaacaatccgcgaactaaaggtcccataatgagaagctgaagcggataggctacgataaagtttttcataacgatcaacgcatagcttgaaagaagcggctctccgtctaaacctttcgtaagtgacatcgtaattaatccgtatacagacatgaaaagcaccattccaatcaccatacatgatgataaaatcaacacgacttttaactgtttagacttatcaaacggcagtgaaaatgctactttttttgccacgggacctactacgaaagtttcgataatcatggcaactacaaatgtgataaccaaattcaaaataccttctgcaagtgtgatatgcccgatgacatcatttatgaacatgttatacatcgtcatcacaagcaccatccctccgcacatcatcattccaaaatacatactttcttttttagttgtgggcacattcctcatccttttcatgttttttacttggcttagtatagctttttatcttccttcttcgtaagtgaacattttgtgaacattcatctaaaaaaatgccctgtgatcaaaaaacagtcacagggcatttttttagacttaagcggcgcgtgctctttttttgagtagggctgagtatggcaaattactctagtctacatcgttaataaatgtttggagatttaacaaaaaacccccgctttatgagctaaagcgggggttggttttatagagattccgtgtgagatgcaggcggaattggtgtttgggctcgaaatactttttcccatttcgagacgacgatacaggcaatggcgtgacccggaacgttaactcctgttctggccatatccatgatgcggtctactccagcaataattgcgactccttcagctggcagacctactgcgttggctgtggctaaaagcacaacaagtgaacctgacgggacagccgcaattcctttacttgtcattactagtataagcatcataaataattgctgagttaggggcatgtcaatattaaaagcctgtgctaaaaagacgcacgaaacggataaatacagcgtggagccatcacagtttaacgaaaggccggacggaataacaaacgacaccactcgtttaggacatccgtacttttccatccgctccatcagctgtggcagcaccgtttccgtacttgttgttgaaaaggcaataagaaacaagtcccaaatcattttgaatacttcaaagtagttgaatttgaacaaaaacccaacaagcggaaataaaacaaataaaataataaaaagacctaaaaagacggttccaattagctttagcattggaagcagaagtgcaatgccgtattgccctacagatgcagccattagcgctagtacaccaagaggcgctgtgaccataacaatttgcgttaatttaaacataattttagccgtagattcaaaaaatttcattgcaggttcggatgctttaccgactcctgcagcggcaacaccgaataaaatagcaaagaaaatcacggccagcaaatcattttttgccattacatctacgatattcgttggaatgatgttcaaaatcatttgtttaaagtctacgactttgtcggtgtactgagacaattcaccgatatcttttttaacaagatgagaaagatcgaggcctactccgggctttagcaaattcactaacagcagaccgattcctaatacgagggtagtaatgatttcaaaccaaataatcgtctttaaccctagactccccatttgtttcatactgccgcttcccgcagcacctatgacgatggttgaaaagacaatcggcaccacaatcattttaatgagccggataaacccgtctcctaccggtcttaaagccatcccaaagtccgggaaaaagtgcccgataacagctccgattactaatgcaattaaaatttgaaacgctaaaaactttttcacatttctacctccctttcgccttcatgaaacggacatccattccattaatatccaaattctcagacactttaagtaagttcgggacatttagctagattccttctaaaatagacaaattggtctatatatttcgttttatcagttaaaatgcatagaaaaaagccagagtgaagttgttcttgatcctggcttttttaattcttatgcttttttaacaaactgagattttaagctcatcgctccaaatccgtcaattttgcagtcgatgttatgatcgccttctactaaacgaatgctttttactttcgttccgattttcacaaccgatgagcttccttttacttttaagtctttgatgacagtaactgaatctccgtcttttaaaaggttcccgtttgcatcttttacagtcagctgttcttccgtgttttctgttttttcatcttgtccccattcatgcccacactccgggcagacgaacaggtttccatcttcatatgtatactgtgattgacagcttggacaattaggtacattcattttcttttcctccagcagcagctcgtaaccaatggtacgatcacgagattacattttttatctgttttatactgtcacaatttcatgagattaacaagcttttctatttccttgctgctgatgttttcttttccaaataagtgagccgataaacagaacaaaacccgctccaaagacaagaagctgatctaaataaaagtcacttgtttttacataccgtataataaataatcctccaaacatgagcatcagcatacatgaaaaccgaatgaggtatgaattgatgtccatctttcattcctcctttttgtaagacttttttgttatgaaaaaacgcgaaccatatgccgaatgtaaccgcatataacggtaaaatgacggctagtttttgcttccaccctttaaaaaaagaagaattacgaagcgcaaaccaaagctctaacgtgccgtataataaaagtgctcccgctgctagtatcgcaatcacagtctctcctaagtccatacatactcctcactttcattctacgcacctgaagctaagcgcagcgtatatagtaagtttcatcattataaaagagcttataatcgtgatgcatacgaactttgaatactttttcctatatacatttattaccattatatcataataaaagcatttttgagactttttatatatgtaaattattgtataatcaaaagtagacacagagaaaaaaggggagaattttttgaagagaactcagcttatttttgttattacactgcttattgaaactggattaacctatgcgtgctcatcatttttgtctatccgctttattgagcttatgttttttagcggacttttgttttcagttttgactttttggttttcaagtagcggaagcaacagcgcttcttctcactataaaactcattccatgaggttaatgtctggggccaatattgaacacaatccgtttcgtctgcgctggacggcttatttttttgcttctttaagctttacgggagcgggcctgatttttttcgttctgctgctgacggacgttattcctccagtaagctaaaaaacctgctcttcacagagagcaggaacttacgagaacagcttgagaggcaggcattttcgctttactttattcgcaacagcttgagtcacatgatcttttaaaggcctagtcaatattcgtttcagcggatgttttagcatccgtttgctcacgggaactttaaagataacgctgagaattactgttgctaaaaccgagagcagcaataccgcaaaaggctttttttgaaaccatctcgagaagataagcatcattacgtaaataagtgctgaccaccccaaatgccagccgtgcctaaatgtaattcccttacacctgagcccaacccattctacaaacgaagctgtacatacccattttgtaatatatttcacctgcttagcgagtgtagacggataagtagctaagaacgacaaaatcatgagaggcgtaatgaacataaggtgtaaaatacgcagtagttttaatgaaagatgagaagatttaaaatcccaaagcaatttatcattacataaaaaatagtagagaatattaaaaaagctcacgtataaaaccccagcatacagctcgcgtattttgttccacgttttcttatggatattttgaaaaaccagccatagaaggacagaaatatgcacctttgttcacctctctaacgtcgtttttagaatctctgttattatattttcgtttctttctgcttcttttcaatttgtcgaatccatccaatcagcatccggttaagatacgattttaacgttacgctagtaaaagtgtgataccacatccagccggttttccattcgataagattcgtccgtttttcagcccataattcaataaaaaacataggaatcgtaaagagcacaattttatataaaacttttagccctttatcgtaatacgtagcctgattaatcatgacggatatcataggatacagcaaaaaatcgaacaacacgttaattctaaactgttttttcaataagcgagttggatatcgaagaaggccgtgagtaataataaatttatcaataataccatttgttaaggcgttaaatacataggccagcagccagtctttaatcggtggttttctaaataaaaaagggagaattcctagggcgataatcagcattacacgtaaaaatttcacttcaaactttttatttctcatcaccttttcgctcctttcaccaagtgttgttagcctaccttcatgtcaattggcagcttgagacggctgttctcaccacgctcaattattgcttatattaatttataaagatacgtagcagcgtctaatgtaaattccccgtacataacccctaagttcacgttatccatacatacgtaaatgtttgttttagttttaagttctttgaagagatttatacatgtggttgagacatgaaaaaagcccaactctaatcagtacgggcttcttcctccacctattttgtttactttgagcgctaccatccagctacaaatccatccgttcgtgattcacttcctccgcatagcacgccgctttcaggatctctccaaataatctgtccgcgcccaaatgccattgaatcaacagctacttcaattttatgtccttttcgttcaagcgcttgtgctacgtgtgagggaaaagctggctccacaaacaccgttttatcttttttccactgccatcttggcgcgtctaaagcggcttgaggatgaagctgaaagtcaatcgtattcatgacaacttgcatatgtccctgcggctgcataaaacctcccatcacgccaaacggtcctacgggctcattatttttagtgagaaagcctggaataatggtatgaaacgtttttttattaggagcaaggcagttatcgtgatcagggtccattgaaaaattatggccgcggttttgcaaggcaattcccgtttctggcacaacgattccagaaccaaagcccatataattactttgaataaatgaaaccatgtttcccgcttcatcagccgttgctaaatacaccgttccgcttccgacaggttctcccgcttcaggccgaagagcatgttcttttataagactgcggcgatagcttgcatatgtatcagacagcagctcactaacagacacgctcatttttgcttcttccgtaatgtatttttccccgtccgcaaacgcaagctttatcgcttctatttgtttatgatacgtatccacagcgtctttttcttgaagctcaaagcctttgacaatatttaatgccattaacgcaacaagcccctgaccgttcggaggaatttcccatacatcatatccacggtagtgagcggaaatcgggttcacccactcgggctcataagcagccaaatcttccttggataaaaagccgctatattttttgctgaatgcatcaatacgatccgcaagctcgcctttataaaacgcttctgcatctgtttcaccaatgagctgaagcgtacgggcatgatggatggatgaccacatttctcctgcttttggtgctcgtccatttggggcaaacgtttgaaaccatgactcaaattcttcgcttgtatgtactcgtttgaacgtatcgtacgcttgtttccattgtttcgcgagagtaggcgctagcggaaatccttctttggcgtactgaatggcaggctgcagtacttgagaaagaggcagtttgccaaatcgcttcgataaagcagcccaagcagccggagccccgggaaccgtaacgggaatcattccgtccttaggaatatctctgtatcctttttcctttagcgcatcaatggaaatagactgcggagaaggtccactagcatttagtccgtacagctgatcatttgtccaaacaagcgcaaacgcgtctcctccgattccattagatgcgggctctaatacagtaaggctcgctgctgtcgcgattgctgcatcaatggcattgccgcctttttttaaaatatcaaggcctgcctgcgctgcgagcggctgagatgtagataccattcctttttttgcataaacgggaactcggtaagatggatatggatgataatgcggatcataggtcataaaagcgcccctttttagatatttaaattttctaaaaaatataacttctttattttatcatattcataacgcatcggctttttttatcttagaatgacatgacgtctcttacctaaaattggtatactgatagagtacaagaatcgccaaggaggatgatgtatgaaaaaagtaaaagctgcccttccactcgctgtttctttagcactcggacttcaagtactccctatgtccacttcacctgttcaagctgaagcagcggcaaatgctgctcatcattcagcaaaagttgaagtcaaacgagcaaacgcatttttaacgaatgtcgccaacggcaaaacaaaagaagctaagcgctacttttcccgcagcctgcagtccaaaatgagtgaagacaacctaaaaatatggtggtcagctctaacggctcagtttggttctgtaaaaaagattggtacatctgtacaaggtgaagtcaataccgttcatcgaaatatagaaatcccaattgaatttgaacacgtatcagctactttaaccgttcgatttagtcaaaatcgtcaaattgatgattggcgaatcgtaccggaggagcgccagttttcgttttccacaccgtcttatgacacccctaagaactacagtgaaaaacagctttcaatcggcaaagcaccttacgaacttccagcaacgcttactcttccaacacgttcaaaacatcaaaatgtacccgttgtcatattagttcacggatcaggaccttctgatcaagatgaaacgtttatgagcttaaagccgtttcgagatctggcttctggactggcttctcgaggaatcgccgttttacgctacaacaagcgtacatacgaacatacagctaaaatgtccggtgaaagtaaaataaacgttgacgatgaaacaacggatgatgccgtactcgcagtcaaagcaatggcgaaacaaaaaggtatcgacagccgcaatatttttatactgggacacagtcaaggcggcatgatgatgcccagaattttaaagcaaacgcaggacaaaagcgtgcgcggctctattttacttgctgcaccgagccgcacacttccagagttaatgcttgaacaatttgcctatcttgtatcgctgaatcagcttccaaaagagcagcttactttttttcagcagcagtttgccattttacaagacccaagcttttcgccagctcagccgccaaaagagttcctgcttggcacgccttatttttggtatgacttagctcactggcaccctgcagaagtcgcaaaatctcaggacacgcctctgctttttttacaaggagcgcgtgattatcaagtaacgacggaagattttgaaggctggaaacaaagcttatctcagcgttccaacacttcttttaagctttatccaaagctcaaccactttttcacagaaggaactggtgaaaaaagcacgcccgatgaatatgctgtttcagccaacattccttcttatgtcattgatgatattgtgaaatgggttcgtgaaacgaaaaagtaaagaaaaaagagcggctgtttccgctcttttttctttactttttatttaagatgatatgcgactgatcggaagaagcggtggattttcttccttttccccagcctacagcttcccggtaacttccgagcaagtgctgatttattacatgctgttcatttacttctacagtttgttcagctaaaggcgtcacatataaagcatctaccggacagtacagttcacacataaagcaagtttgacaatcggattgacgagctatggaaggagcacctcccattcgagagcggtcaaagacatttgttggacaaacggatacacaaagattgcagttaatacatcggtcttcactaagaagctcgatcattaaataaccccctttacgcgatcagaagattttgtacctaagggtctcgcccagacttcctgcacccctccgcttagaatgcggtagtgttgcttggaatccataaacggaaaatcgtcacgccggtgcattcctcgcgtttctttcctttctaatgcacttgtatacatccatcgcgccgttgccgtcatggccgcaagctctcgacttctcacgatgtttctttctttatcatatactccattcttcaactcatcccacacggcatttaacttcataagggaatcttgcagtcttacttctgaacggaaccagtttcgatcatatggaaagacttcgcgctgaaccgatgctatcatttccttcgtatctgctgcgtcagaagaagctactgactttgtgattcctgacgcttctgatacgccttttgcatgtcgacttgcggcattttttccttgcttaacagcaaatgctgccgctgcttttcctgaccagcagcctgaagagatagcccacgctgcattatggcttcctcctcccgtaaatcctccgcaaattaattcgcgcgttgccgcatctccggctgcatataaacctggaatgtcggttctacacgtttcatctgtaatgtgaatacctcctgttcctctaacagttccttcaaaacgcagggtgattggaaacatttgagtaaagggatttatatgaagacgatcaaatgataaaaagaaatttggctgtgataagcgcatggctttttgaatgctttcatccgctttgtccagccttgcataaacgggctgggtcattaacgttctggcaatgatggaacgtcctttatgagaaccggctccttcaatcactgtaccgtcttcataataaaatgtagcccatttataaaatgcagattttgtgattggagaaaaagctggcgaaattgaataagcatttgaaaactccatacctgaaagggccgcacctgcttctgtagctaataagtaaccgtctcctgttaaaacatttgtaccgagtgctccgctcagaaatgcacaccctcccgttgcaatcacaactgcagcagcctctactctccatgtttcttgcgtttgattattgattccgcacgcacctgccacaccgtgttcatctgcaagaagctccagtgcggggctgtggtccaaaatctgaacgtctgctttttgaagctgacgccgcattaatctcatatattcaggaccttgaagagtcgttcgctgagaaatccctttttcatctactggaaacggatagccaaaatgcgctaactcatttacttgttcaaacgtacaatcaagcactcgcttcatccagcttctttcggctaaatatcctcccagctcttccctgcttttcatcgcggtcatctgttcatcagaagtgggctttacataccaaactcctgtaccagaaggcgcagttgctccgctcgttccgcaatatcctttatcaacaagtgcagcttttgcaccttctttaactgcttgcagagctgcccatgcaccagcagggcctcctccaataattaatacatctgtatgaaaatgaaagtcggcagtcatatacggatcctcctcttaaaatgtttacgctctcaaaaccttattaagaaaaaaacttacttactgtccattcgactattttactcatcgctaaatttataccaactattccgttccagaatccaattcttccatagcagccgctcaataaaaaaggagaccagtccatttgtttcaccacaatggtctggcctccagttgcctagtaggcgcgttttttcgtacagcgtcagcaatacctagtaattcactttgtttaattatatattaaaagtttatgctaggattgtcaatgattatgttattcttagaatttatttcgattgttcgtatctcgtattgacaactctatgaattttttggtaaattaatctcactaaacgtataggaattaaaaaaaccgaccagacaactggaggctcttattcttttaaaaagaatgagagcctttttgtttcctgaattatatgtaatacgataaggaggtcaagtatggcaagtgctcaaccacacgtaattcaatcgcgtcaagacattatcaactttgttaattcaaatccagttacctctaaaagctggaaaatcattttagtagcgttaggcggcatttttgtcgatgcctatgactttaccagtcttggaattggagctgatcagttaaaagaacagtttaacctttctcctgccggtcttggaagtcttacagctattatggcccttggcgctttgttaggagccactgtaggaggatactacacggacaaattcggccgcaacaaaatgtttttaattgatttattttttatggtcttctccgctcttggcgctgctttagcaactgatttagtttggttgtttatctttcggtttttaatgggcgtaggcgtagggctagatgttccggtagcgctcagctttattgcagagttcagcaatttaaagaaaaaaggtcaatacgtgaacttgtggtgtcccctgtggtatgtggctgcaactgttactggacttgttgttctccctttttatctgcttgggcagcatgaagatatttggcgctggtcggtaggatttggagctgttgctgcactaatcgtgctaattttgcgctaccgctacatggatgaaagtccgatgtgggccgctcatcaccttccgcttaaagaagcggtcaaagtgttagagaaaacctatgacatacaagtcacagtggctaaaaatgcaaaagaagaaccattatctcgttcaaaaaaactgtcttacaaagctattttccaagggaagtatcgggctcggacatttctagcttccatcattacggctactcaaagtatgcagtactttgccgttggcttctatatcccaaccatttctacgcttatttttggcaaaggaatgatttatgcaattatcggtactcttttctttaatttatttgggattattggcggctttacacaatcacggctaactgagcaagtcggtataagaaagcttgccattacaggctataccatttgttctttaagcttagtcctgatggggctcacaggcgatacacattttattgcgctgccaattttatttattgctttatttattttcggtcaatcttttggacccggagcgcaagggatgacgatggctactctttcttacccgactgaactgcgagggctaggctctggatgggggcaaggaacaacgcgtattggcagtattttaggtttttacttatttccggttgtcctttcaattggcgggatctatacgacgtttctggttcttacaatcgttcccgttattgggctgatcgcgacgattcttattaagtgggagcctattggcacagatgtcgaaaaagaagaagagcaagaatttgaaagcgataaaagctttagtaaaaaaagtgaggtctatcactagctataatcctagtaaaaacggaaaacaccttcaagtgcagtgtgcttgaaggtgttttttgttaaaggtcgataaaatacatactcgtaaaaggctatgcaaagcgccccatcactaccgtgttatagtacttgccgtcagacagcaccttatcattttttaatactccttctatttcaaacccgaactttgtatataaatcaatcgcttttttattggtctctaacacatttaacgtcattttcttcatgtccgcgctatctgcccacagtatggactgctgtaaaagctctttgccaattccgtatccccaatgttcttttgcgatgcacacgccaaactctactttatgagaaaatcgtttcaattcgttgccttggcaccttgaaaatccgacgatttcattatgtacgcttgctactaaaaataagtttcgtttactttctgtgtcacgttgaataagttttttaaaatcggattcttccatacatccttcccctggttcacgatctaagttttccgtttctccgtctagctgaactctaaggtgagacagttcgtgtgcatcgctggtgtcagctgaacgaatgatgtactgaagtccttttacattatagatttgctggttgatgaccatcgtattcctccaagcgtctttcataaatctatcaattgaatttaatttcctttaatataaatattatacataaagaaagagagctgaacgagttgctttggttactgcttttaattctatacggcatttacaagttctataaatcaagaagatctctaacgaagtttgaccatttttatgagaaagcgtttgagctagaagaaaaaaagcgatatgaagatgctcttgatatacgcaatcaagggatcgaactccatacccttaccgatttagaacgagctgatttacatttagcaaatgggcgtatgcttttaaaactaaagcaatacgaagaagcaacaaaacactacgatgcctcatttaagctagcaaaatatgaaaaattcccttactcagaaggatttgacgaagtcattgaagcttacttgtatgcagggcgtaaagaagatgcgctgataataaccaacgacatgttaaaacggcaaagctatgatcaaaaatttaaaaagctagagcctttaaaagaaaagcttctttcatatgaagattcatggtaaaattaaacaattgaaagcgtattattaagagcgactgaggtgaacgtaatggtcataaccgtcattgtaggagtgctgggtttaattggtttaattgcagcaggttttgcgacgaattataaagatacgaagtaaggatacataaaaaagaacaagaaccaaataggttcttgttctttttttaacgagccaacagcttttctgttatgcgcaaaaacatctttacgccaatttcaagcgagtcttcatctaccgtaaacttcggatgatgatgagggtatacgatgccttcttcttcatttcgtgctccaatgttaaaaaacgccccttccgtttcctgcaggtaagctgaaaaatcttctcctcccattttaggagacagcgttttaacccgttcttttccatattcttcgatagctgtttcttcaattaaacgcgtaatttctttagagttaatgacaggatgatagcctttttcatatgtgaaggtgtactctgcaccgtaggcttctgttagtcctttgacgatacggtcaatttgtgccggaactttttctcgcagagccgcgtcaaagctgcgaacggttccgttcagctccactttatcaggaagtacgttgtgcgtagttccaccgtggaattgtgtaaccgatacgactaatttatcgattggattcgtcgttcttgaaacaatcgtttgaaggtttgtcacaatttgcgctcctacaacgatagcatcaactgcttcatgaggcgctgcggcgtgtcctccttttcctttaatcgatatgttaaacgtgtcaggcgaagccatcataggacctgcaagcacgccgatttctccgacgggaagaccagaattcaaatgcgtaccaattacgtaatccaccccttccaccacgccttctttcacaagctcctgcgctcctcccggcagcagctcttctgcgtgttgaaaaatcaagcgaatttctcctttaaattcatttcctaactgagaaagaacagaagctactcctaataaaatagccgtgtgaccgtcatgtccgcatgcatgcatcacgcctttatgaacagaagcaaatgcaaacgtgttttcttcttcaatcggcagcgcgtccatatccgctcgaatcgcaactactttcccctgctcttttcctattaatctagccaccacgcttgttggtgtaggacgcgtaatgataaagcttccaaacgaacgaagcgtatcttcaacgtactgagccgttcgatgctcttgaaacgataattcaggatagcgatgaaaatgtcttctccactcaattacctgcttctttaagctttctgtgacgctgtattcactgattgatttgactgtcataaacaaactccccctttgtttgactatatcgattggctggaacggagagatttaaatttccgcgcagcgtatcgctttcatatgaagtgtcgtaaagcccatgctcctgtaagataggcaccactttttccacaaattgatgaaacgtctcgctcataaaaggacgaagcacaaatccatccgctgcttcttgctcatgccatttttgcatttcatccgcaacgtgttcaggtgtccctgaaaacggcgaacgcggcaatattgtttcaagcgccacttgtcttaacgttaacttgcgagcagccgccgcttgtttaattttatttgtcgtgctttgaaaggcattggctccgatatcccctaactctggaaacggtgcgtctacgtcaaattgatgaaagtcgtagtcatcaaaaaaacgagatagatatgtaatggcatgatcaattggaattaaagcggcaagctctctatatcttctttctacatcttcctcgctatctcctataattaaatcaatacttggaaaaatgagaagctcttcgggatttcttccgtgattttttgctctatttttcatatcttgatagaatgcccgcgcttcttctagtgtatgtgcatttgtataaatcgcatcggcattctctgctccgaattctcttcctctttctgatgaacctgcttgaaacacaaccggatgtccctgctttgaacgagcaatatttaacggcccttgaacttgaaaatgtttacctttaaatccaagcgtatgcattttctttggatcaaaaaactgcccggtttctttttgatagataaaagcatcgtcttcccatgaatcccacagtccttttactgcatcgagatgctcttttgcaatttcgtatcgctcgctgtgatgaggaagatatcctctgctgtgattgcgcgctgccccttcttgcggagaagtaactacgttccatcccgctctcccgccgcttatatgatcaagagacatcagctgacgagcgattgtaaaaggctcactgaaacttgttgaaatcgtcccgactagtccgatgtgactcgtagaagcagcgagagctgacagcagcgtaattggctcaaaacgatttaaaaagtgaggaatagacttttcagatatggctaatccatctgcaataaagacaaagctgaacagtcctttttccaatatacgcgcttgtttcttataaaactcaatattaatgctcgcatcaggctctgcgtccggatgtctccatccatccgtcgtatttccaaggcctttaatatttgctcctagctttagctttcttttttcactcaacgtatacttcctcctttttacgacaaataaaaagagatgctttgattgttcaaagcatctccagtcgtctggtcgattgtttttaaacggctatttatttagagcaaaatagctgttgacctctcatttatttagcttatttgaatagtatactcactattcctataagtcaagtttgtttttagttaaaataaatgatctcttctttctttaactaaacttaattacgatttcattctttttaaatttcttaaaactcattttgactatcggaataaccggtgatataactatatgtacattcagcatccatactgcctgtcaggctactgaaggctcttatcttctcttcaacttgaagcgagataagagcctttggcatttaaggagttgaatgtttaacccagctcatttattttcactatttaactaaggaggcgttacatatgagtttgcaatttgcttattgggctccgaacgtaagcggaggtcttgtcatttccaacattcctcaaaaaacagagtggtcatttgaagcgaacagccggtatgcgcgaattgccgagcaggtgggctttgattatgttctcttgcaaactaggttttttgcaagctacggagctgaaaatcaactagaagctgcgactctcgcttctgctttggccgccactactaaaaaaatcaacattattacagcagttcttccggggctatggcatcccggcgtatttgctaaaattatttcgactattgatcatatcagcagcggacgcgtctcagtgaacgttgtaagcggctggtttaaaggcgaatttaacggctacggcgaaccatggctagatcatgatgagcgctaccgccgttctgaagaatttattaacgtgcttcgagagctatggaaaaacgaaacgactacgttcaaaggagacttttaccgattaaatgacgcaccgttaaaaccaaagcctcttcagccgccaaaagtatttcaaggaggaaactctaaagcagcccgtgaaatggcaggccgagtatcagacgtttatttcatgaacggcaactcgattgaaaacttaaaaaaccaaattgaagatgtaaaagcaaacgcaaacggccgtgatattcaattcggtgtgaacgggtttgtcattgtccgtgaaacagaagaaaaagcaaaacaagtgctaaaagaaattgtgctacaagcggataaagaggccgttgaagggtttgaaagtcaagtgcaatttgcgggaaaagcttctcctcaaggtgaaggcatgtgggcaaactcttcatttgaaaacttagttcagtacaatgatggctttcgaactggccttatcggaacgcccgaacaagtcgccaatcaaattatcgaactgaaaaaaatcggcgtggatattattttgacaggctttttacattatgaagaagaaatcaaaacgtttggcgaaaccatcattccgctcgtaagacaaaaagaacaggagctaaaagaaaaagcgggcgcattataaatagtttatcgtaacaaacattaaaatttttggaggtatgttatgtcagtcgaagtttctgcacgtcctttatacaatcaatcaacgcgcgcttattacgcgtccatccgcgagaaaatcacttctcttgtagatgaagtgatccggcctaatgcagcccttacagatgaagaaggcgtttttccacgaaaaaatttagaagcgcttattaaagccggctggggaaacattcttgtaccaaaggcatacagcggcttagaacttgatcacgtggcttttgcgattgtagctgaagaaattgcaaaagcttgtgcttccactgctttggtttacgtgatgcatgtcggagcaattcaaactattacgctgtacggaaacgacgatcaaaagaaacgctggttgcaaccaattgaccaaggactgattggtacgtactctacaagtgaaaaagcctcaggaggacactggtggtacaacttcagtcaagcgcagcgaaatggcgaagattatgtagttaatgctgacaaatcctttactacgagcgccgggcaagctgatttttatatcgtccaaacacgcagtcctgaagcacaagaagcaacggatattagcttttttattgtagatggaaaatcagacggcatcaccgcaagtccatgggaagcgctgggcgttcgcggcaatcacagcggtccgatttcttataaaaatgtacacgtgccaaaagaagatcttctaggcagtgaagaaacagggaaagaaatcgtcttaaacggcgtttcccctatttatttaattggccttggttctgcttggcttggcgtagcggaacatgcgctagagcttgcggttaaccatgcaacgcgaacgattcaccgcgattttaataaccagcttagcgactatcaagtcattcgccagcagattgccgaagcaaaagtcctcattgaaagcaccaaaccatggcaaattgacttggcagaacagcttgatattttacaagctgaacaaaaagcacagggtgttcttacccttccgctgactgaatttaaagttcatgcttcagaagtagccaacaaagcaacgcgaattgcattggatgtaagcggcggatacggctataaaaaaggccctattgaacgcttgtttcgagatgccagagcgggcattgctatgggtccttctaataatattgccagagaatggatcggaaagaatcttgtaggacttccgcttgaactttggattaaaggaggagagtaaagtttaatatcgtaaaaaaagagaatcctctatagagattctctttttaaattttttaacgtaacaactacactccctattttatgtccggtttctacatactcatgagcttctggaatttgttctaaaaagtagcatctatcaatcactgattttatcctcccttcttccatcagctttttaagaagtaataaatcttccgtctgcactttggcaattccttgcccttcgactgaaacaaagcgtccatttaaggctaacgctcccttgcactgattttttgtgatttttccaatagcatcaaaaataagattatatctttcttcttttttattaaaatcttcgttttggtagtcgatgacgtaatctgctcctaaagattttactagttcactatttttagcactgcacacgcctgtcacttcagctccgtaatagctcgcaagctgtacagcggcagttcctacagcacctgaagcaccgtagataagcactttttgcccggcttgaatgtttccttttctaaaaaaatgcagcgccgtcgtgcctccgaaagaaatagaggcggcttcttcatgggttacattctctggctttacggctatcgtccccttttctggtaagcagatatattccgcatatcctccgaacttcatgcctgtcatcgcaaaaagctggtcgccttttttgaaacgcgttacgttctttccgacgtcctctacttctccggccagctctacgcctagtattgattttctaggcttccgtaatcctaaaactattcgcattggaagccataacagcagtggactgttaaagctcctcactctgcagtcgcccgatgtgaccgtggtggcatgaatttttatcagtatttcattctcttttggaataggcttttccacttcttcaagctgaagaacatctggtttaccatactttgtacataccattgctttcataacagctctccttttttcactagagttcaatatatgtttataaactatgctcgtcgaaagctattctttcacattttataaagaacgctggtgaatctactatcacatatggtaaataaaaggatattgctataaaataagtataaaaacagaaagcgtggtacgtgttattgtttaaacttcttttaattgaagacgatgtaacgctgtttaacgaactgaaagaacggttggagcaatggtcttatgatgtttacggcatccgtgatttcagtaacgttatgcaggagtttagcgaggtaaaacctgatttagttattatggatattcagctgccgaaatatgacggatttcactggtgcagaatgattcgttctcattcaaaaatccctattatttttctatcttcacgtgatcatccttctgatatggtaatgtctatgcagtttggagcagacgactttgtgcaaaagccgtttcattttgatgtgcttgtagcaaaaatacaggcccttctccgccgcgtgtataattacagcgttgaacaagtaaaccttctttcatggcaaggagctacgattgattatgaaaaaaacaaaatatcaaccgaatctacagctattgatttaaccaaaaatgaaatctttattttaaaatgcctaatacaaaaaaagaatacgattgtaagtcgagatgaactgattaatagtttgtgggaagataaacggtttatcagtgataatacgctgacggtaaacgtcaatcgcctgcgaaaaaaattagatgaaattggactgggaacttttattgaaacaaaagtcggccaaggctacgtagcgattgaagaggaacgctatgattaaactctttattcgcgagcgtctaagctggattcttttcttttttatgatgcatctttttatgctttttatcgcttatattgatagctccattcctgtgtcttcgattctttatatcgtgtttatatcatcaattgtctttcttattttttgcgtcttccgctatcataaagaaacgaaattttatcaagggttaaaagatgaagaggatttctttgattcttctactctttctcatccgctgcgcccctttgaaaagattgttcagcgaaatctgatgcaacaattagaacaagcgaaaaaagatggcgtgcagactcagctgtacgtgacgcaggaaaaagatgaactgttagcttggattcacgaaattaaaacgccgttaactgcgatgcatttaataattgaacgcttagaaaatcgagaagttaaagcaaacttgacgttcgagtggctacgtattcattttttacttgatcaacagctgcatcaaaagcgcattttctttatccaaaatgatatgtatattgaacatctggatttagagtcccttattttcactgaaatcaaaacgctgcaagcttggtgcatgcaaaaaaatattgggtttgatgtggacctacaggcagaacgtgtactgtgtgatgcaaagtggctttcgtttattatgagacagctgttaacaaacgcagttaagtacagtgaagaatctgatgtgatgattagaagctacgagcaccgcggtcaagtatacatcgaggtaaaagataacggacggggcatttctcctcaagatatgccgcgcatttttgagaaaggtttcacctcaactacgcagcatgaagacggccgcgctacaggcatgggtctgtatctcgctcaaaaagcggcgcacgctctttcgattcatattggcgtgcagtctgctcttaatgaaggcacaacttttacacttgcctttcctaaatcaaatgattttgtggatatgaaaagcatgtgacaaaaatgtcacatgctttcgttatttgttcggtgaatcaaaggaaaacgaaagtccctttttttataataaacgtatcagatcaaaggagtgagtacatatgaacatattagaagcaactaatattcataaaagctacggaaataaatttaatagacaagaagtattaaaaggcgtagacattacgattatgaaaggagaatttgtaggaattatgggcgcttcaggctcaggcaagacgactcttctgaacgtgctttcctccattgataaaatcaacggcggaaccatcaaaatcgaaggaaatgaaattagcagaatgaaagaaaagcagttagcaaacttccgaaaaacacatttaggctttatttttcaagactataacttgctcgatacgctgacagtgaaagaaaatatcctcttgcctctttctgttgcaaaaactccttcagcagtagctcacaaaaaatttgatgcgctggccaaacagctcggcatctatgagctgaaagacaaatatccaagtgaaatttccgggggacaaaaacagcgtacttccgctgcaagagcctttattcatgagccaagcatgatttttgctgatgaacccacaggtgctcttgattcaaaagcagccagcgatttgttaaacaaactgaccgatcttaatgacaaaagaagtgcaagtattgtgatggtaacgcatgacccagtggcagccagctattgcagcaaagtcatttttataaaagacggacaaatttatacgcagctgtacaaaggggatcaaacgcaaaaagccttttttgacgatattatgaaaactcaaggcgtgctaggcggagttcaacatgaacattaatcagctgattttccgaaacttcaaaaagaatgtaaaaaactattatttatacgtttttgcgctgatgttcagcgcagctttatattttgcttttgtaacgctgcagtatgatccggctcttgatgcaaccaaaggttccattaaaggaggcgcagcggttcgggccgcttctgttttacttgtagccatcgtttctatctttctattatatgcaaatacgatttttattaagcggcgcagtaaagaaattggcttatttcagctaattggcatgaccaaaacaagaattttccgtattttgaccgctgaaaattttatgctgtactttagctcgctgattgtcggcattttaattgggttttcgttttcaaaagtaatcattatgattttatttaaaattacggacaccaaaggtatcgcaaaacttcatttttctgaagaagccttgattcaaacgctgattgtgttcggcgctatttatttgctgattatgacgatgaactatctttttattaaaagacagaccattttggctttattccgagttacttcatcgacagaaggcaaaacaaaaaaaatcagtatacttgaaattattattggaattcttggcattatttttatcgcttcaggctattatatttctgccaagttgtttgatggatcttttacaagcatgaatgctttagcaatcgccatgatatctattttagctttagttatcataggtacttacttgttttataaaggctccgttcgttttctattaaatctcatgcgaaaaagcaaaaatggctacttgacgattaacgacgtattatctctttcttccattatgtttcggatgaaatcaaacgcgttattactaacggttattacgactgtatccgctcttgctatcggttttttatgcttgagctacatttcctattactctgctgaaaagtcggccggagattatgtacctaatgattttgctatcaataattcaaaagacgctgcttcgtttaaagccgcgctggatcgaaagaaaatagcctacacggaaaaaaagatcgacgtcatccaagtaaaagcaaacgtaaaaaacattctagaaaatgatttggaaagtccaatggtggactcgtccgctatgacgattccaatgattagtgaaaaatccgttagtggtgtagatgtagctccaaacgaaaccttgtttaccggctataataatatgcttcaaaaaacaatggcctttaaagattcagggcgtattgagctaaaaggtaagcaaaaagtaattccacaaaagtttgtaggattaaatcgaaagtttcttctacctatttattttacaggaggcggtttacctactgcgattgttgataattccatatttaataagtttaaacaagacgcagatccttctattcaaaaagaatcttctctctacactggaatagatatatcaaaagaagatgacctaccaaaagcaaatgagcttttcggagagatgaaattcagcgataatagcttaaataactcacgtatagaaatggcagcgagtcaaaaacaaaatatgggtctaatcatgttcattgttgcttttctaggactggcatttttaattacatcgggctgcattctttattttaaacaaatggacgaaagtgaagatgaaaagccgaactatacaattcttagaaagctcggcttcaccgaacaagatttattaaaaggcattaaaataaagcagctctttaatttcggcatacctttaatcgtaggcttgcttcacagctattttgccgtgcaatccggctggttcttgtttggaacggaggtttggacaccaatgattattgtcatgattgtctatacggcactctactctatctttggtattttatctgttctttactataaaaaaattattaaagaagctctttaaagataaaaagcacaagctatagcttgtgctttttatctttatatgccattaattgctggcattttctttatttccctgactggctgcatgtaaaaaactttctagtcgctttttgacaaacggccactcattgtcaattatactgaagataaccgaatctcgtacgtatccatcaggtaaaaccatatgttttctgctgatgccttcctgggtagcccctaaccgtttaatagcagctctggacctattgtttcgcacatccgttttgaattgaacgcggtgaagcttcagctcttcaaaacagtatttcaacaataaatacttacactccgtattaacccgggtgcgccacacggatggatgataccacgtccaccctatttctacgcttttgttgggaagtgatatatctaaaaatcttgtgcttcctaaaattgaatgtgactctatatcaaacacagcaaaaggcagctctcttccctcttgcttggcttttaaagcactttcaatcagccgtttcatatcacttagactatgaacttttatcgggagatgctcccaaatttctttcggttttgcagcttcatataattcttgttcatgtattttttcaagcggcattagctttaccgctgttcctgcaagctcaactgactgtaacataacctcgctccttttcgatacatttaaagtaaatgttaatacgtgtatatgtactgaaaaagggtcagtttctgcttattggaaggtatcactttcagcatatatatctattaatcagctaagtgttttttgagaaactcacttattgtttggaaggcttggtccgctgattctttattaaaggcttgtgaaaaaggattcataaaaccatgaccaccataaaactttttgatttccaaaagcggctctcttttttggactagtgagtttattaaacagtctacatcaaatgtttgctcttcagcaggaaaaataagaagagttgggcaaacaggacttctatttacataatctctaatacgtgatccgtaacagccaatcacaaagttacacaaattgctttcactgcatagccacgacattgttgctcctacactgaagcctataactcctacttcttcatattcttgttttagttgaattaacatgttagtaatttgtcttgaaccctcatccataccaatgttttgaacaaagttttgataagccattccttcttctttatagctataaggaacgtcgttagataataaattaggacagataatatctgcctctaacttagacaatttctctttcataaaattcatatgatcgttcacaccgtatatttcatgaattaataaaatggctttatttgattttttcatttcttttataaaacagtcgtttctctcgccagttcacggtgcaatacgtctcccatgcgcttcatgccttcaacgatttgttcagcggacatattagaataattcaagcgcagcgcattgtttcttgtaccgtttggaaagaatggcgttccaggcacacaggctacgttattttttagacattctgaaaagatatgtgctgaatcgattccttggggcagttctacccaaataaacaatccgccttctggcttactgtaagacaaattctccggaaaaaattcctcaaggcacgatagcatttgggtacatcgctctttgtatacggctttaattttttgaatgtgcgcttcgatatcgtaaagctccatgtacttagccgttacgcgctgagcaaagctgtccgtatgcaagtcagccacttgcttaaacgctacgtacttatcaatgaaagcttcgtctgcacatacccagccgattcgaagacctggtgcaaaaattttagagaatgtgctgatgtaaatcactctgttttctgtatcaaaatgcttaaccggcggcagcgcttctcctgcaaatcggactcctccgtacggattatcttctacaatcagcacgtcgtatgcgttcgcaagttcgatcattcgctgacgtctttctcgcgttaaggtgcgccctgtaggattttgaaaatcaggaatcgtataaataaatttagcctgtggattttcctgaagctttttctctagctcttccataatcattccatcttcgtccatgtctacttctacaaacgtcgcattgtaggatttaaatacgttaatggccgctaggtacgttgggctttcacagattaccacgtctccgtcattaaggaacagtcttccggtaagatcgattgcctgctgagatccggacgtaattaaaatgttcgaaatcgtggactcaatgccgatgtcctgcattcgtttagaaattgcttctcgtaaagggatatacccctctgttgtactatattgaagcgaagcggctccgtcttcacttaatacggcgcggcacgcatcgttcattgcttcaacgggaaatagctccggtgctggaagtcctcctgcaaacgaaatgacttctggtcgttccgttacttttaagatttcacgcgtttcagaggattttacaagactagctcgttgggcaaatttatctttcattgatgatcattccttttctagattttaaacttttaataacgagttaattattcgaatagtcagaaaaattaaagcaaaaaccttccctgtgagctcaggcttcttttaagccttggaagatgcctttttaatagacaaccagcatctgcttgctctctgactcttcatttcttcttgatgtcacgttctcctttcggtacatatttttcttattcactatttgtaatacaaatcaaaggtcgtacgataaatatggccttgtatttaatgtatgttaaaaaggataacataaaaatcaaataaataaacaataaattctataaattcttaattttttatgcaaatatatttatcttagtaaattattttgtaagatcccttcccttttcattgaccttccgtgtaaaaccctttataatccttattaaatcgataaggtttaaaggttttagtacaggagtgataaaaagtgaaatggcttcatttgctgtttaatgaacgatgccctaaatgcaagcaagtgttaaatacatcaaaatccaatgcgcttcgctctactgttgtaaaagtatgtccgtctaaccactatcaaaaagaatttcatcctgcgcttgaaatgtttgtggaaagtgatgaagtactataaaaaaagctaacgctatggattcccatagcgttagctttttttatagcagcccccaccaaatcttaattgccgttgctaaaattaaaccggcaaggatccactgaagcacttttgtattcattttctgccccacttttgcaccgattggagaggcaatcaggcttgcaccaactaaaataagtgcagggatgaacgggacttggtgagtgaccagttttccaaccgttgatccaatagaggaaataaaggtaacggctagtgaagttgcgatggtaatccgagttgggattttaagtaccacgagcatgacaggaactaaaataaaggctcctcctgctcctaacacgcctgctacggctccgataagcagtgataaaatagaagctaatcctttattgaattgaagtttgccttcttttatctcatctaactttttctttggaataaacatcataataaccgcaataagagctaaaactccatatacaacatttaatccttgttcattcatataatgtgagctgtagcttccaagcatgcttccgattagaatattgctgcccatatatataattaatgatttgtttaaaaatccgctttttcgatacacccatacgccgcctattgtcgcaaagaacacttgaacagctcctgcacctgagacttgatgagccgttaatgctcctactcctactaatggaggaatatataacagcatcggataattaataacagacccgccaataccgaccataccggaaataaacgacccaataaatccaataagaaaaagcgtgatgataaatgtaagatccatctatagtcgctccgtttcatataaggaaagggtaccttttacaagagatacccttttcgtccattatttcttatccttttttaatccaaaacttaaaaacgtcgccttcttctgtctgaagaagctcgtgaccaccagattgtgcccaggctgcaagatcgttttttgctcctttatccgttgcatgaatttctaacacttgacctgcttctagttcattcattgctttttttgttttaacaatcggcattggacatgccagcccttttgcatctagtactttagttgattccatttctctctctcctttgtttaagttgaactttttacttagcgaatcgcacagcggtttggtccaatttccatttcacgctgtttttcttcatctggacttactttccccatattggtttcacggatgtcttgatatgcatttggctgcggcggtaagttatctgttactaagtgtctgaactctgcttcgtctttaatgtttaatccgtgattttctgcaaacaaagtacctaacttttcagctacgctgccgttatcatttagctcatcaataatcataaaatgagctggcaatacgattaactcatctgataatgctttatagcgtttataaagcgtctcgcgcagatcgcctacccagtcttcagccataccagctaaatcaggacgtccaattgaatcgatgaacaaaatatcacctgaaagtaagtattgatcgtctacgatgaaagaagttgatccaatcgtatgccccggtgaataaagaggctgaatcgtaatcgctgtgttaccaatcacgacatcactgccttcttctaaaggcttgtagtcaaaaatcacttcttctgcatcttttggaggcagccagtaagctgcatttgttgcttcagcaataactcttcctcctgaaatgtgatctgcatgaaggtgagtatcaaacacatgcttaactgtgacaccaagttctttggcaaagttaatatacacatccgccatacgcgtcgcatcaataatagccgcttcaccgttcgatacgatcatataagataagcatcctttaccgatacgaacaaactgatagacctctccgccatctttcaaatcgccgactttaacaggctctaaatattcactccatgctttcataccgcctttaaggtaagatacggtaagacccgcttctgaaagcatgtcagctaccatcactgatgaaccttctttggcgcagacaactaacacttctttatcagaagggattttttctaagatttcttctactccgtctaaaagatcgaaatacggcacgtttaaatgctggaattgatgaccttcaattttccaatcgctaaaatcactttcgttacgaacgtccaagataaatagcggttctttattaataattttagctgtaacttcttttgcagtaagtacatgcactgtcatatcaaaatacctccctaggtatatgaactatcaaaattttttaatccattataatcgattggttattctactttacctgtccagtcacgcataccaggagccacgttaattacgtttttaaatccttgctttttcatcgtttgccctgccatttcacttcgtcttccagagtggcaaataatataaatttcattctctttatttagctcattcgaacgtttttctacttcaccaagcggaatatgaactgcgcctggaatatgagcttcatcgtattcttctacttcgcgaacgtctaaaatatgaagatgttcatcattctctacttttttcgcaaattcttctaatgaaatttcaggaattggcgttacgttttcttcagcgccgcctttacgaagaaagtggtgaagaacgtcacctgctgtctctgtacctaaatactcatgacctgtgctttttgcccacgcttgtaagtcagccgtagagcctttatccgttgcttgaatttctaggacttgacctgcttctagttcattcattttcttctttgtttttacgattggcattggacatgctagcccttttgcatctaatacgaagtttgcttgcatcatttctttttcctccttggtttaaatactagtaggggtatatttttatctaaaaaaattagaccgtttcccctttccactccatcattccgccggtcatattcgttacactgtagccttgctgctcaagaaaacgagctgccattccgcttctgccaccagaacgacagacaacaatataattctttgctttatctagctcatgcatacggtattccaataaaggaagcggaatatttaacgcgtttggtattttacctgtttttacttcctctacttcacgcacgtctaaaatatgaacttgttcttgcttttttactaattgttctacttcttgtgctgctattgccttcaccctgcatctcctccttcttgatttatctccacgtattcatgccgcctttaacgttggtgatggatgtaaaaccttgctttttcaacagtttacttgctttcatacttctcattccgctttgacaaataacgactacttctctgtcttttgaaagctggcctgtttgcgctggcagttctgataaaggaatgtttcgaaaccctttaatatgtttggtacgaaattcatgcggtgttcgcacatcgataaactgtttatgtttattttttaactctgcttttaattccatcgtcgatatttgctgtattccttttactggtgcaaaacgctgatacaaaaaccacaacagaaagatgataataagcgcattgataatcatattaaccctcgcttcatgagttatcttttagatgaataagtttacgtttccgtcttctgcgtcggctaaatacgccgctacgcctgcatattcaatattatctagtagctctttttcctgtaaccctagaaggtccatcgtcatcgtacaagccactagcttcacatcttgttcttgcgccatttcgataagctgcggcaaggttagggcattatgctttttcattacgtttttaatcattttaggtcccatacctgcaaaattcattttagataagcccattttatccgcaccgcgcggcatcattttgccaaacatcttttctaaaaatccttttttcaccggcaccatttcttctttacgaagcgcattcaatccccaaaacgtatggaatatcgtcacttcatgatcataagcagctgctccgttggcaataatataagctgccatcgctttgtcataatcaccgctaaataatacaattgttgttcgtttcttttgttcactcatgttgttcctcctattaccctatggggtatatttaattctaaaaaattagctcttttgaatgtaaaagataaatgtactgccttcttctttaaaataaataagctcgtgtcctgttgattttgcccacgctgttaaatcacttttagcacctttatctgtcgtttgcacttctaatacttgacctgttgttaaagtatccattgctttttttgtttttacgattggcattggacaagctaatccttttgcatctaaaacttgatcaattttcatcgtatttctctctcctttttatatacatatacctgtaagggtatattatactaaataatgatattcgtcaaccttaaacaaggtgacaatgattaacgacttttcactaacagctgtacagcttctttcactaaaccttccgttgactctccttgctccaggctttctctgacgcactgttcaagattgctgctcacaatgactcccattgtgcgatcaatggcacttcttgcagcagataattgagtcacgacgtctcggcagtcttttccttgctccatcatgctaagcacgccttttagctgcccttcaattcggcgcaggcgatttttcacctgttggttatactccataatcgaatacccctttctttcctttacttttacacactgctaactcatagctgcgtacttcaaaacctttttttcgtaagaaccgtacgcctaaatttaactccactctatctccggcaatcagatgaacgctgccctgtggaatttctgaataaaagcgtttgagatatgcatacggaataactatactaatcgaatcgtgaacttcatgataatgacgaatatctacaaccgttcgcccaagttcttttgcttcagattcacgtatgcactgtattcttttaacgggataataacgtctgtatgcaataaataaaatagcaagcaacaacactgctatatagagcataaccatcaccgccttgctattgaattaatgttgtttacacgctctatattatacccctataggtatattgtcaagcgagaaaattatatttaattttgatgatttacatgaatcctttcatacgaaccaatccactttatccaccttagaaatcatgaatgttttctttaacctgctttattgtgtgtaccccctcccctatagactaaacagacttttccgttttcatacatcacctgggctcatataaattaataaaaaataagcttactgcaccattcaccatctgcgcacaaaaggtccagttctccttgggaactggaccttttgtgttaaaaagctgattagctttgatgataaatattatgccattgattccatgaactgtgtggatgctgctggtgccactggttccatggcacatatggattttgctgatgccactgattccacgtgccgtgcggatattgatgatgccactgattccaaggtgtatatggatgttgttgatgccattgattccatgtgccgtgcggatactgtttatgccactgctcccaaggtacatgaggatgttgctgatgccattgattccacgtgccttgaggatgctggtgatgccattgttcccatggaatgtaatgttgctgtccttgatgcatatttcgtcaactccttttcctttgccacatcatatgttcattttttgatttagagcttatcttttttaaaatatagggggttaattatttgtaaattacacatttcttacccttattaatgaccatcttacttataggtatgagctcttctcttataagcggaagcgcaaacttatctggaattatagaatgggtatttcttatgatcagccttattgctaatattactgccgtgattgccctttctttacacgaatttgtctacctttctatgaaaaaggctgagaaaaacctaaaagaaacgtttaaatgaacataagcaaaagaagcaggtttcttataagaaatctgcttctttttcctgcttttattgaactggtttttctcgacttctatacaccaaaagatgcatgtagctctttattcggaaggagatggaaatcttgctgcttcgaaatgcgacacattttctgttgtgacaattgtgccgtcaacattactttccgcgaagacttcaactcgatctcctttttctaaattgtaaatagtagagaccgatactacgttaacaaatatagtgtttcctccaaagaaatcgttatcaatcgcgataaccgccgtaccattgacacgaatttctacgcgcgctcgataatcgacagtcgtatcgttaggaagaaatccaattgtagcaacaagggaatatacgccatcttttttggggcgaaaaacagacgtaacaggattgtattcatttgctaaatcaaattgtttaaactgataagaaacttttacaggagtgtttgctgatacgggctggtttgtaaggttaagagcacgaaatgctgagtctcttgtatttccttgtttggaagaacaatgatgatgtttcttagaaaaatgagccttttctacataatatttatcatcttttttaattgtaatcatcctttctttatgtgtctctctattttattcattcgcaggaataatgcttggatgcttgtcctttaacacataattttcactagaggaaacgatagatttctaagcttcccacaaaaaaacaccttctcattcgagaaggtgtttaggaattaacctacaatattataaccagcgtctacgtgtacgatttctcctgttacaccgcgtgaaagatggctcagtaatacaaccgtcatgtcgccaacttctgcttgcgttacgttacgcttaagaggtgctttttcttcaacatggtgaagaatttggttaaagtcagaaatgcctttcgctgcaagcgtacgaattgggcctgctgaaatcgcatttacgcggatattgtcttttcctaagtctaatgctaagtattttactgaagactcaagcgctgctttcgctacgcccattacgttatagccttcaactgcacgttctgcaccaagatagctcattgccacaagagaaccgccttctgtcataagaggttttgctgcttttgctaccgcgataagtgaataagcgcttgtatcttgagcaaatgcatatccgcttcttgatgtattaataaactcgccgtttaaatcttctgaatgagcaaacgcaacagagtgaatcactccgtgaactatgcctgcttcttctccgatttttttgaacgctgcttcaatgctttcgtcgctgtttacatcacattctgcaattaatgatgcttgaatttcatttttttctagcagcttgtttaactttcctagtgaacgttctttacggtatgtaaaaattaagtttgctcctacttgatgaagggcttttgcaacaccccaagcaatacttctgtcgttggcaactcccatgatcacaatgttcttgttctttaattgtaataaatcttccatattatcctccaaaaaaaattagtcatcaatgatgactaataggtaattgtatagctttattatagcacaaagatgcgcttagttcctaagagtcttatgaattaaccgattttgctatataaataatcttctacttatccgaatcctgcagccatgcttgcgttgtttcagcaaattttttggctgcaggtgaaagatgataacgagtagctagaccaattgaacggtagctgtctacttgaaacggaatcgcacgcagctcttgcgggatcgaatccaaaagcatttcaggtaaaatgctaattcctaagtgatgcgtaaccatcgataaaatagcactttcatccattaattcaaaacgaatgtcaggctgaatgccacgttcttcaaacaattgcttaatatcatgataaccgccgtatgtcggcataataaacggttctttctctagatcttcaaaagaaacggttttctgatggtatagagcactttgattcgatacgacgcacagcagccggtctttttttaaagaaataatatgaaattgacttgaatgcgtaatgttgataaagccgcagtctatttctccgctcagcagccactgttcaatttcaaggtaatcgccttctttaagctgaatttgaatctcagggtagtttttttccataagctgaataatttcggggagccacttggtcgatacgcttttaaaaataccgattttgatggttcctttcgcaagtcctaagagactggctgcttcttgatgaactttttcattttcttggagcacattccgaatagcaagaagcatcgcttcgccttctgttgttaaggtaatacctgatctgtttcgattcacaagcggaaatccaaattctgtttcaagatttgtaatggcatgactgaccgctgactgcgtgagcgccagcgcatctgccgcttttgtaaagcttctcacttccgctactttgtttaaaatttcatatttcactaagctcattttctcccgccttaacatgaatttaattcatgttcatcattataaagattcattttattaatatcaaattcctttgtatactgtgagtacatcataaacaatggagggttgaacgtgagttaccgcacacgagcaaatatgatgatggttggtgtaaatgtattttggggcatgtcgtacgtgtttatgaaaatggggctgagttcgctcgggtcatttactatcattgcacttagatgtttaattgcttttttgattgccggactgtttttctataagcctttactacatatcacgcgcaaaatgattttatcatccgctattttaggctttttactgttttcagttttttcatttgtcacgtttggcgtcagcatgacgtctgcttcaaatgccggatttcttgtcagtttaacggtcatttttgttccattgctcaactgcctgttagtaaagaagcttccttcttggccgattgggctcggtattatcactaccctaaccggtataggtgttttaactttaaagcactcctttcatatgaatactggtgatgtactttgcattggaacggcgctatgttatgccattcatattacgctgaccggcacgtttacgaaaaacgaaaatccaattgctctcggcattttacagctaggttttgctggattatttgcactgatttgcagttttttatttgaacatcccagcattccagctactttatcatcatggattgcgattttaggtcttggcgttctttgcagcgcgattggattcatttgtcaagctattgcgcagcgctatacaactcctactcacacaggacttatttttgcaacagagcctatttttgctgcgctttttgccgttctttttttgcatgagctgtttacgcttaaagaactgattggttctattattgtggttgcggggattttaattgctcagttagacaatttgctactaaaaaaaagagttcattatcaagagacattgccaaagtaaaagccgctagattcgtttacctagcggcttttgttattaagctaaagtataagctttcttttagcagtcccaacacctatctctatttttcttttaatggatgctagtatttttcaaagtctattgaaaaaagcacgtctaggagaacgactgtgaagcttattaaacgaatacttgcaactattacttcatcgatatgcggcggtgcagtttgcatcgaaatatttgaattaaattcccttggctatacaagtatattagattatttatcgactttgcttattggtgtatatcttacggctccattcatcattatagtaggcctcccttgttcaatagctataacaagcatcatgaaatacataaattcacttaagatattaattgaactaattctatatcttcttttcggtatcgttggagcactcgccgtattaactttatttttgctaagcgacgggatatccgcttttagtctcttcccgcgaatcctcattgtaacgttgagctgctcattgccgtttgggttatcatccatccttataaacaggctatataaaaagacgatctaatatgcatagaccgtcttttttatatgttttgctacaaacacagctctcatatctatcgtgcattacaataaccgatatgattttgcacaaaggcttagcttataccttatatgtataaaactttttatctacgttcatcaccgggaaattctcaggcagcttttctttctctatatgttgaaacccatttttctcataaaatcgatgagcagctctgtattgtaatgtggttcctaaatatattctttccacttctctctgttttgcccacgcgatggctgtatgcaataaccggtgagctgttttgaagttcgctcctctataagactttgctacaaacattttccgcagcgctacttgacggctgccaatgtctattaaagctacgcttcctactactctttcgttgcaaacagcaacccagaagtttccgtttccctgttgataaaagctttcgatttcaaacaaatcaggctgatctttttccgttattggaacttggtattcttgctgctgaatatgaagaattaaatctactacttgctgttgatacttgctcgtatatggctgaataatgatactttcactcaaaaactctaccccctctaattactttactccaccttgcttttgactgtttttaataatgtataacctatgtttattacaaaaccaatcaccgcacctacaagaattgatatcacacctacagcgataaaatctcctttagtcggctgaaataaattcatggaaagcaaaccaaacataaaaagcattggaataagataactcagcatctttttcaccttagtacctctttccctatctccataaatcttgtaaccattttatcgtatatcaacttcctatttattacaatctttctcttttttcgtatcttcattagggaaataaagaaaaaagcgcctgcctctcgttccttactaattgagagacagacatttttttataaaacatgactcgttgcttgtaaaaagaactgagattgttcatagttgtacgtcacttttgaaaagtcaaacggctggccgttggctaagtggaaaagcgtttcaataaataatttaggatcgccttcttttaatcctaagtacgtagcttcttcttcgttcagcttgccaacgtgaagatatagatcagaaaacccgatttttaagccaagtccttctttaatgtaatgaaaaatagactgagaaacaatttcgttattcaagtacgtaacgatggatttattataaaacgattcttctagacaaagcgtctgaccgttgatataccgtactctttttacataatagacgtcactattttcttctatgtttaaatttaacgcggcttcttgcgtcggctttcgtacatctaactcaatcacttccgacgttaactgaaaatcttcaagttcactcgtgaatccttgattggaaagcaagccaatatagcctgttcgtttatgacgacggacaaaaatgccgcttcctcttacttgaaaaaccacgccttttttctcaagcagatctaaggcctttgttaccgtacttttgcttgccttaaactgcgccatcagcgtttctaataccggcagcttatctccttgctgaagcttatggtcttcaatataggtttcaatttcaattgcaatttgttggtatttaatcatagctatacctctttactgaatttgtctcaagaataacacgattataccataatctaactctataccataaactttaattattcattaattattattttattagggtattgataaattgtatcgatacaattatactgaaagcgtataatcaacaagggggttgaacatatgggagggaaaattagagattatcacaagcttgcagcagacattttagatgcggtaggcggcgaagaaaatattgtaagcgctacacgctgtgccactagacttcgaattgtgttaaagcgctcgaagccagatgccaaacgcaaggtgtcttctatgcctggtgtcattacggttgttgaaaacagcggacagtttcaagttgttattgggcaacacgtgggagatgtttatgaagagtttgctagtttagtaaacttggataccactgaggagcaaactgaaaacaaaggtacgatcttaaaccgtgtgattgctacgatgtccgctgtgtttgcaccatttgtatacatcttagcagcggcagggattttacagggctcattaatactaattaatttgttttcggatagctttgcaaaaacgggcacctatcaagtattaagcttcatttcatgggcaccgtttgtttttttaccgatttttatcgccatcacagcatccaagcattttaaaaccaatacctacatcgcagtggcttgctgtgcagcattagttagtccaacatgggcagaaatggcggcgaaaatttcagacggaagcagcattacgtttttaggtcttcccttatccgaaacggtctatacttcttctgttttaccgcctttatttttagtatggatcttgtcttatcttgaaaggttcctaaataagagcattcatgaagtcgttagaccgctgtttgttccgtttttatgtatggtaattatggttccagtaacaattttacttattggtcctgttaccacgatgggggctaatggaatcgctcatagctataactttttagctgagaacgtacctgccttagctggagcaatcattggcggcttctggcaaattgttgtgatctttggagtacactggggaattacgccgatggtacttgcaaactttgatttaaacggcagagactcattccaagcgtatcaaacaattgccgtggtagctcaagtcggagcggtacttggggttattttaaaagcaaaaagccaagaagcacgcaaagtcagcgtatcagccgggataacagggctatttggtattacagaaccggccatttacggcgtgaacttacgttttaaaaagccgtttatctttggatgcatttcaggtgctattggtgctgttgtagcaagcttctttcacccttattactttgcttacgcaggactgcccggacctctgaccattgtaaacggaatcagtcaagactacccgatgtcaatctggggaattttaattggatgtgccattgcgattattcttcccgttgtgcttattcaagtgtttggttacggagaagatgcagcaaaagaagcagctgctgctcctttaaacgaagtagccgtcagcaatcccaacgacaatgaagaaacgatcagcgcaccgtttagcggaaaagtcattcttctttctagcgtaccggacgaagtattcagctcaggtgcgatgggagaaggattagcgattgatccttcagataataagctttatgcaccttttgacggaacggttgttatggtagcaccaacaaagcacgccatcggccttcgatcagaatacggcgttgaattacttgttcatattggattagataccgttacgttagacggcaagccgtttacgctgcatgtagaagacggtgtaaagtttaaaaaaggcgatttactgattgaatttgataaaaaatttattgaaacacagggattacaaaccattacgccggttattatcaccaattcaagtgcttatcgagaagtgattgttgaagatattaaaaatagcgggctgaatcaaacattatttaccgtagtgaaataaggaggaactaacaatgacaaagatgccaaagaattttttatggggcggcgcattagcagctcatcaatttgaaggtggatggaaccaaggcggaaaaggaccgagcgtagtagacgttatgactgcaggtgcacacggtgtagcgcgacaaatcactgaaacagtggaagaagataaattttatccaaatcacgaagcaattgatttttatcaccactataaagaagatatcgcactgtttgcagaaatgggcttaaaatgtttgcgaacgtctattggctggagccgtattttccctaaaggcgatgaagctgagccaaacgaagaaggactaaaattctacgatgatgtatttgatgaactgttaaagcatggaattgaaccggttattacgctttctcactttgaaatgcccctgcatttagctcgagaatacggcggatttagaagccgaaaaacggtggactgctttgtgaagttcgctgaagtttgtttcgaccgctataaagacaaagtcacgtactggatgacgtttaatgaaattaacaacaaaatggacgtacacaaccctctattcttatggacgaactccggcgtttctgtaaagccgggtgaaaatgcaaaagaagtgatgtatcaagcaggacatcatgaactgcttgcaagcgctcttgccgtatcaaaaggaaaagaaattaatccgaatttccaaatcggagcgatggtttcacatgtgccaatctatccgtattcttcaaatcctgaagatgtgatgttagcagaagaaacaatgagacagcgctacttcttccctgacgttcaagttcgcggctattacccaagttatgcgttaaaagaattcgaacgagaaggctatcatattccgtttgaagaaggcgacgaagaaattttacgaaacggaaaagttgattatttaggcttcagctattacatgtccacaacggttaaaagcgacgttgaagctgataacacgggcgatatcgtaaacggcggattgccaaacggcgtagcaaatccttatatcaaatcaagcgattggggctggtcaattgatccaacgggcttgcgctatacgttaaaccgcttctacgaccgctatcaaattccgctgttcatcgtagaaaacggatttggtgccattgatacggttgaagaagacggatccattcatgacgcatcacgaattgaatatttaaaatcgcacatcgaagcgttagaaaaagctgtaacgtacgatggtgttgatttaatgggctatacgccatggggaattattgatattgtttcctttacaacaggcgaaatgaaaaagcgatacggcatgatttatgtcgaccgtgacaacgaaggaaacggatcaatgaagcgctacaaaaaagattcctttaactggtacaaacatgtgattgaaacaaacggtgaagaactataagaaatcagaaaagcggggttcctgcgtgaaaacacaggaatcccgcttttttaaaacatgtaaaaataaagacaaatacgttatctcggtttatctactagctgtgtttgcgcaatttccgtttgcttaattcccgctcgttgaatttcatcagcaaacgattcatgtttcagcgttttgattaccttttcgcttccatcccgaagagtatacactctaaattcatacatactctaccctctcctttatgctatgattgatgcgatacattagatgcgctcctgtaaaagcaactcataatagaggtaacttttttctcttctttactttacccactttttaggaaactagacaaagagatttaatccgacgtgataaaagcctttgcagcaagcaaaggcttttatcgatggaatgttagtattcaaagatggttccttttttaaattttgaatgtttaaaagcaaatttcgttaaaagaatatacgcaactcctgcaactaccactcctataatccagcctaaatcgacttcgataaacgcagcacctgcgccgatgagcatcgcaagcatggcgcatggattgtagccggaaaacggccctttttcttgatacaattcttctacgtttactctttgttttcgtaaaatatagtaatcaaccagtaaaatagaaacaattggacctaaaaaagcagagtaaatcaaaatgaacaaaccaagacctgcagctgatgaatcttgaacaagcacccaagggaacgagcaaaaggcaagcagtccagtaatggtaaccgccagtttataatttgcttttgtcagcagcgtaatcacatacgtaggcggaataatatttgccaccatatttacggcaataacgccaatcacaataaaagccgatacagcaacggtaatatatgaattatccactacaaccgcgaacgctttaactggattggaaatacccgtagcagaagcaagcattgccccgattgtaagaacgaatccgtaggctactagaattggtgtaaagtataagaacccacgctttgtgtcgctaattcctggcttcagttctctagagtaatcggctgcgcttagaaaaatcgctgcataattccccatgaacatcataatgaaagaaaagaacggaagtccccatgaaccttttgtatctacccacttctcccctactacctcactatgagaagttaaaagaacgccaaatacataaacaaggccaagcaatatgatgattgaagcaagcatctctacccatttaaccgcgtggaagctgtacagagaaagcacgatttgcagcagctgaatgataataaagcaaagaacaagattatcaaaagaccctttagtcacaattttcccgatttcgtttaaagcggtaccgcctgtccagctttggaaaccataccaaatgatagctggaatacctcgtaaaagagacgatatgacggatccttttattccaaaagacattcgaagctgcatcacatacggtatgcccgtcttatagccaattcgatcgtttaacacaaaaaaagtagaaataataccaatggcaataatcgctgccacaaacgtttgaaaaagatttaataccgcagtacctgctactactatgcttgcgccaagcgtcatatttcctaaattaacgccgtctccaatccacataaacatataggacatcggagttagctttcgatcactttccgcttttggctttagtgacggatcaaggcctgcatcttgatgagaatgcacctcttctataacggaacttgttgcatttgtagacactatacactcaactccttttttatgatgtttccactcttattactaacatttaatgtgagttaacttaacatgtacatagtgtatacgaatttcaacgcaagttcattattatttatgtgaattttctgatattattttgtgcgatttgactaatttttgacctcagctcgcaacatatagaagttgatgataataaaaaatccaagcgcttataataaacgcttggatgagtgatgagctagtatttatttttcacaggcaatgtagtctttatctcgatctagctttgtattggcatcatacagtgattttgacacatacggtttgtactttgttttgccgcctttatttgttacattagccgcacgagctacgccgcctttgtagtctttgtttaattccgtacagtttttgtaagatttagctgccgcatctacgtttgaaactgtgctaaaagatacgctcgttaataaaccgaaagatagaacaattggaaaaatctttttcaaaagagatacttccttcctatattttttctaattaataatagaatgttctatcgatcttttcaatttttttttacatttaaactactattatccaattttatttacgagtaactttaagagtcttcaccgcttgtttagccgcttctgcaattagtttatcattatactctgcatctttttccgtacgattggagaggatcgcaagaacaattggatctccttttggcggccaaaggatagcaatatcatttcgcgtcgcgtatgagcctgcgcctgtcttatcggctacttcccagcttttcggcacgcccgctcgtattaacgcatcccctgttgtgtttcgcttcatcaaatctgttaaaagtgcacgtttgtcttcaggaagtgcctgtccaagtacatatttttgaagacttgcagcgagtgctcttggtgtacttgtatcgtgggtttctcctggattcacttcatttaaatccggttcaaagcgctcaggcagcgtcacatcgtctcctatgttttctaaagcttctttaaatccatccggtccgcccagctgctgcagaattaagttccctgccgtattgtcgctgtagcgaagcgatgcatctgcgagttctcgaagagtcatgcctgtatctacgtgtttttctgtaattggattgtagtttacaaggtcatcgcgcgtataaaagattcgttcgttgagatcttcaattgacttctgctgtaaaagtgcaccgacagcgagagccttatgagtagacgcataagcaaaacgctcgtccgggtgatacgttaccgttttattggtgcctgtatctaatgcaaaaacgccaagattcgcatcatatttttcttcaagcttagcaaactctcgatcactctttgtttcttgtctttgacattttaccgtttcagcatgtacctcgctgcttgaaaagcctacaaccgccgcgcacgaaagagcgaatacaggcagcattttttggagctttgaagcgcgaaacatctttttccatgtcttcattacccttcaacacctttcaaaaaaagtatttagtatgtattctcttaggtagagattaccaacaatgctattttatcaattgtttactctcacaaacatgatagttttatcacatttatataataaaagtgtctcacactgaagatgagcagtataaaaaccgtaagtactttaaaaaataggcggcgtaacggaaaataaaataacggctttctcttcaaacgtattctcccatttatgattcagatgcgaaggaattttgacactatctcctttttctaacacgtatacttcctcgtccaaatacactttaattttcccttctaagacgtatgccacttcctctcctttatgtgctaaaggagtttctgatgaagccatcatcggcggtacttccataatggccgtagctagattccctgtgaaatcgggcgatagcagcgaatacgttagctcttttaccttcattgttttacgctcattcgaccttacgactaaatgagatgtatttatttcttcgagcaaaaagctgaaggtaggcacatcgaggctttttgctaaaagtttaagcgttgaaatggacgggttagctaatccccgttcaatttgacttaacatagatggcgtgatgtccgctaattttgctaagtctcgactgcttagccccttttcttttcgaaatttctctactttttttccaatatctatgttttccatgatgattcctccgtaaaagatgtttaattacatttaattttattaagttaaacttaataaacgacgttacttatgttaaattatatttaataaataaattacaatttaatactatcacagtaaggaggaagaaaaaaatgaatgacatcttgacctttttggttcttacattatttgtgattatgagtcctggtattgatactgctcttattaccaaacgaacgatggcagatggacaaacgggcggctataaaatggcattaggcttagcgagcggttctttagttcacacactcgccgctacgtttggtttatcagctcttcttcttcagtcagctcttgcatttgaaatcgtaaaatacgcaggagccgtctatttaatgtacttaggaatttctgctttcctttctaaaaaaagcgatacaggttcttctgcaaaagaagaaaaaacaaaagaaacatctgcttttcgtcaaggtctggtctcaaacgtccttaatccaaaagtggcggtatttttcttaacttttttacctcaatttgttcaaaatgatcaaaacgtaactcttcaattacttctgatgggaataacgtatacgatcctcgctatcacgtggtttttcgtattcgtcttttttattaactatttacgaaaatggcttacaacacctagcgtgcagcgctttatggacaaagcaacgggcgtggtgttaattggatttggattaaagctggcttttgaaaaacataaataacaaaaaagctatctgtttcagatagcttttttgttatttatgcacttcaggttcatagagatagactttaaggtcaagctttccatccgaagaaacgattattccttccgcttcgagtgaatgtttttgaacaaggtgcatttcttcgtctttaaatccaatttctcctttggagttgataactcggtgccaagggagtttatatttcttactcatcgagtgcaatactcgtacaacttgccttgcacctcgcggactaccagccaggcgggcgatttgtccgtatgtcattactttcccggatggtatttgtttaataagtgctactgctcgttctgtaaaactcaagtcgctcctcctttcgtttcttctttagtacaacattaccatattaaataaacagtgaaggaatcactcgatttttcttcagcaacattataagataataagaagtacgctcatcattgtttaacatactccaaacaaatacttactgattatttcctattcttcaactaacaaatctttgtgcgagtggcagcttatacctcatttatgacactgtgattataaaaacgttacagaaaccaacacagcaaggtacgtagaagcgttacatgataagataaacagtagatactaatacaatttcaaattgatgctgacgaataagtaatcatttaaaaagtggtgagaaaatgacaaaatggcttagtgtaaaagaattatctaaagaaacaagtattcctacttcaaccatcagaagatatatagataaattccaatatttctttatacaaaaagaggatcatcgaccaaaacaatatgaagctgcggctgcgaccgttttactgaaaattaagcagctttatgatgagggttatcaagcagaagaaattaatgaatctctgcaaaaagaattctctttgactacaagcgaggatcaagctgccgtgtctctagaagaagccgaagacaaagaggacatagagaacacagcagaaaccgctgaccagcccgaggccgacgaccagcagccgacaacttctgaacttcctgtacagccttcaccccaacaagaacctgatacaaaacaaattcttcaggaaaaagacaagcagcttattcaatctttgcgtaaaagcttgcgtgagcagcaggccatttcagaattagtagaagcttcaaaagaaagcagcgtagtaggtaaaaaaagatcgattttaaaacgattattcaaacgaaaaaaggactaaatttgtaaacaagcctaggccatgaaacatctttatttctgatcattaaatttatgtaaaacaaagtttctaaactgtttaacagccggtgatagatatcttccttcaatccatgctagtccaattactcggtgacagttggctttagctaatgggattttcactattttgctttgatctattccgtgtaaatctggaaggatagaaattcctaaaccggctcctacaagtcccgctacggtgtcagcttcctctccttcaaacataatgtgaggctttccccctgtctcttcaaataactgctcaaacgtaagacgaagagaaaaaccttcttttaagtgaataaatgattcctcagcaatttcttctagtgcaattctttcacgatcagcataccggtgatttttcggtacgatcacaaacagctcttcactccaaagatgatgccacttaatgaacgatttttcttccataggcgcaatcaaacaaaggtccagttcaccgagctccagctgctcaagaagcacgtgagaaggactttgcctcagctgaaaattcactttaggatataagctgcgaaacgacgcaattaaatctggaattaaatccgtgctgagcgtatgcaaaaatccaagtgacacctgccctttctcaggatctagcagcgcttgaatttcctcttgtcctttatcaaattctttcatcatattatctacacgcttcaaaaagactttaccgtattgattcaatcgaatggaacgtccttgccggtcaaatagcggcgctcctacttcctcttcaaaacgagcgattgaacgactgagcgcaggctgcgtaattaacagcttttctgctgcgcgcgtcatatgctgcgtacgtgctagcgtttgaaaatatttaaactgctgccattccattttgtaccatctccttatcaagcggctctactcattacatagatgtatgaaaaatatgattataatgaattatacattataaattagaagatgctactataaaaaatggaaacatacttgaggatgtttttagttcctcttgtcgattgctgtatacggcacttattaaaattttatactcatcattttctagcagaaagaagaatttgtcttgaaccgtaaggaaagttattaaaaagctaactaagatatcatagtaactatacatcaaaaagacctttctatcaccataaaagaaaggtcttttttgagaatgtaacacacattttttcttatatgtacctcttaaagtaaacgttttaaagtttaacccgttctactaactgcagcaattcatcattaggtccgtgaaataaaatcatacgaccgccttcaagtgttggctgaggttccggtgataaaaattcaattcctttgctcttataatgttgaattgccttatttatatcttctaccgtaaaggcaaggtggttaacaatcccgcttttgttatactctccaatcggatcaatatctcgaatgagctcaatttccatacccggctgttcttcaagatacaaaaaagccatctctcttttctcgttagatccttgaaggcgaactttaaagccaaacatatccccgtagtagtgaatcgtctcatccatatttccaacaataattgctgtatgttccatttttttaatcatccatcttctccctttccccttgtttagtaagtacaagtaaactatacaacaatttaggcaatatgtatttacatatgtaaagaaattcaagcactctatcaatgagtcggctacgagttgaaaaataacaaacaaaaaaacaaacccaattggtttgttttgattacatatttatagtcagtctctgtttcaacaacgttcgataagccatgttttgtacctttgtactgcaaacgattttactctcgtactcaggcggtaatcatctatctacgattacacatgtaaccgtccgtctctccgttgaattccttagagacagttcccctaccattgtttgggtttctcgctcgtggggtttaccgcgttccacctttgctgtttccagcaaagcttcgtcactgtggcactttcagggatactcgaccatatccgaggacttaggtggtttttcccgccgtcagctaagctataagccaagctgccctagcttattttttcactaggcacgaacactacgggcatctcagcaccgtgcgagcatggactttcctctacatcaaatgatgcagcgattacctgaacgttatttcagatcgtgtatgagtagtatatgcgttttagcttgccgaatcaaatgtaacttttggtatggattccatgtcaatttttgcagtaaattaaataaaataacttgtttctgtacaatctttttagtagatgaaacatccgtaagcccaagaaatattcgcttcatccatttctaagggggatactttgtttctctgtagaatactctataaaccacataaaaagatgacagaggtgatgaaaaatgaaggctgacttaaaatttgattttcatacccatcacgaccgatgcggacatgctcgcggaacgattcgagattatatagaggcatctattgataaaggccttgatatcattgggatttcggatcattctccttatttcgcaagcgaagaagaccagccgtatcctcacattgcgatgggaaaaagcgcattctccggatatgtagctgagattttgaaactaaaagaagaatataaagaaaaaattgaagtgctgttaggcgtagagtctgatttctttcccgatcatgcaaaaatatatcgtagctactatgaaaaatatccgtttgactacataatcggctctgtccatcaagttgatgaagtcagcatctttcataaaacgcgctgggaaggcctttctcagcaagaaaagcagcgcacgaaagaaacgtattatcaattgatcgaagaatccgcccgaagcagaatgtttcagattcttggccatattgatgccatgaaaggattctatccttctttttcttctattcagacagctgttattgatcaaacgctaaaagtgatttcagcacatgacattgccatagaagtgaatacatcaggcaaaaccaaagactgcggaggctggtatcctgcagacgatattttggaaagagctctgcactacggggtacgcatgacatttggctccgatgctcatgatccggagcgcattggcgacgactttgaactcgtaaaaaagcgccttaaagaaatcggctttaaggattgggtcttttttagacagaaaaaaatgcaggtgacacctttgtaaaacagtaaacttaaatacaaatacaaatatgcctgaagacacgcagatgaaggaacatcccgtgttttcaggcatgtgtttttcaccgagaaactttgacttttgtagctgaagataaatcttctccgttcgtttcaattacttgttgtttaggcaccattttttcatcgtccagacctatccttatagtccctctactatctccaacactactaatttcctacataaaataaccacatttcatttcaattgtgctacatttaactaaaaatgatttcttaatgagggacacgattgtgaatttagatttaacagcttatataacgcttatctgtacgtccggtgttcttaatttatacttgtgcttttacgtgtttattaaacgtcaccactacagcaatattgcgcatttatttattcttcatacaggtttcaccgctatttattgtatgggtgcggcctttagcttactatctgttaatcttgaggaaatgaaattttggaccgtcgttcaatacgtgggcatgcctttttcgcctcctgcagggctgctgtttgttatgcagtatgtcggcataaaggtaaggaaaaagcatatttttgcgcttttcatcattccttttattagtttgatcatggtcgcaacaaatgactggcatcaccttcattaccgcgtgtttgaaattgacccagttttaggtgctccttacattcatcaagaaattggaccatggtatacgattcacggcatgttcatcttttcgtctatgttcgttgcttttttgctcgccgtttaccgctggaaagaaacagccaaagcttaccgcctgcagttaattgcattaatggtcgggcaattagtccctatcgtcacagcttttgtctatttaatgggctttacgccgcagggaattgatccagttcctatggttttatgggtttcttcttttttatatttatggtccattaactcatcccgtatgtttacagttatgcccgttgcgaaagatgcgatatttaacagcattaatgacggtgttatcgtgcttgatgaagcttacagattaattgaatttaacttagcgtcgaagaacatgtttccgcagctgaaaaaagcgatgtttggaaaacggtttgctgatatttggttcacgctatcgggcagttcatttccttttacattcgaaaataaaaacagcagtcaagagctgcagctttttttcgcggaccaatctcagtatacgtatcaagttcgcacctctcctttgcagtatgctaacaacagtcacgggttgctgcttatttttacggatatcacggagctaaaaagacttcagctaaagcttgaaaatcaagcttattacgatgagctgacgcaaatttataaccgcagggcattttttcagcacagcaagcaagcgttcgaagaagcaaaaaagtctgcatcttcttttacgcttcttatacttgatattgattattttaaaaaagtgaacgatacgtatggtcattataccggcgatcaggtgcttgtacatgtcgtaaaagcctgccagtccgtattaccgcaaggagcgctttttgctcggtacggcggtgaagaatttgtactcacgctaaagggctatacatcatcagaagctgaggtccttgccaatcagcttcgcaggcacgttgagactcagcccttacgtatcaatgaagaaaccatttctgttacgctaagccttggagtagcccaagcagcaaaacaagaaaacgacacgttggatgaccttttaaataaagcagatattgctctgtacgctgccaaacaaaacggacgcaaccaagtacgtttgtatgaagagaaaaaagaaatgctaaaaagaacctgaacatcattgtttcggttctttttgcttttgactaatattctttcatttatcaagtaaaagggctaaaagacttgattttgtttatgtatttgaaaaccgctcatcttataaactgtatgtagatcaaaaaaaggagagatagagatgaagattacacatattcgaaatgctaccttacttgttgaatacgagggaaaaacgtttttaattgatcctatgttagcggaaaaaggaacttacccccctttttcaaattcgagcagacaagatcaaaacaaccctttagtgaacttaccgatatccgttgaagaaattattgctgatgtagatgcggttattgttactcacctccatttagaccattttgacgatgccgctaaacaggcgttaccaaacgatatcaaaatgttcgttcaaaatgaagaagatgccgcagtagtaaaagaagctggttttaaaaatgtagaagtacttacgcaaaacacggtttttgaaggcgttgaattaatcaaaacaaaaggcgagcacggaagaggagaaattttaaagcgtactggtttagtgtgcggcgttgtttttaaacataagagtgaaaaaaccctctatatagctggagacacggtatggtatgccgctgttgaagaagaaatcaacacccatcaaccggatgtcattgtcgtaaatggcggtgataatcagtttttagaaggcggttctcttgtaatggggaaagaagatatttacgaagtatacaaagcagctcctaaggctacgattatttctgtccatatggaagctgtaaaccactggacgctatcaagggaagaattaaaaggctttatcaaagaaaaagacatgacatctcacgtctttgttccagatgatggcgaggtttatatttttaagtagaagagattgagacataacaaaatcattccaatgtaaagacggacaaatgagatcgcatgaatcgctcgcttatgacaccgccgttgatttccgtgcaagactacgctttccgcgggcgacagatgagcctcctcgtcgcttgcgctcctgcggggtctcatctgttccgcttttcccgcaggagtcttcgccttgccctccaatctacggctagaagtaactaaattgagtaaacctaccttccctctgccaataaaaaattcgaccgattcatcgttcaggtcacccttcaactaacatacttttgccccagcctctttttatagccgtttcatttatcaagtagtagtcgtagtagcaaccgctgaagtgctcgcaataaccgctagcatagccgcttgctgagcttgaataatagtttcaatcgttgtatagatgcccgtttcgaccagtctagaatccttcagcttttcactgataaccaaattaaccgccagcataacattgatgtctttctgccatttaaaaagtttgtctgcgtttagctgtttcactacttcatggatggtttcaatttcagtttctggtttttcaaatagtgctaataagccaatgaccgggtaatgcatcgctttcactttgatacctgccgattcacaggcttcttttacagatacgcatatttcaataagggtatccgcatgtaggtttttatcgattgcgagaatatgacttaaaaattgaaggtcatttccttttttaaatccatgctgccccaatgtggtatagaagtgttcaatttcatgcatcaaatcatcaacagactcgctcgtttcagctaataaaacggcaagaggtacatcaccgcttgatgtaaggaagagatgcttttttttcatgccttgataaatttctactgaccttcgaaccgtttctttatgacttcgacttgactcattcgacagcatagcggaagccgcgatatacgtaaatgcgcctctcgtaaacccgccttgtaccaattgatcatatacatccagaaatacatgaaacgtttcttttggattctcatagcaggtatctagcatggctgcaatcgtaaacctctgcgatgattttaatgtagaaaacattcctacttgatttttaatatagtcacttaactcaatataaggctgaagctgaagcgatttgcctttcactacatacatagaagcgatagccataaactgcttcggatctgccactttccatttgagttcattttttaagctgatataaaaacctctatactgatctactttttgttgaatcgtttccggtagcatatcaacacgtcctttattcgtcgttagcttatatacgcaacacttcaataaaagtttcaatatttggtaaatacgccgtacatttatgacaatacgaaaaagaccccccaatattccgaggtctttttcattcagttctacctattaacctcttcccgcttggaaagaaggatattttgtcataccgccatcagcaaatagtgtaatacctgttacgtagcttgcttgtgacgatgctaagaatgctgcaactgaggcaatttcttccggattgccgatgtagcccattggaatcatgctttctacgtctgcacgctgttccggatctgcgaatttttcagcgttgattggcgtatcaatcgcgcctggtccaatgttatttacgcgaataccttttggcgcatattcaagagccaacgtttccgtcattagcttcataccgcctttacttgctgcatagtgaacaaatagtggccaaggaatcatttcgtgaacgctggacatgttaataacgtttcctttaatgtcattttcaacaaaatatttaatcgcttcgcggcttcctaaaaatgcgcccgttaagtttgtatcgattacttgattccagttttctaatgataattcgtgagaaggaaccgggttttcaacacctgcattattaatcataacgtctaatgtgccaaattctttaacagctgtctctacaaggttcacaacgtcttcttctttggttacgtcgcctcgaacaataattgcttgaccgccagcttgttcaatttctttttttacttctagcgcttcatcttcattgctgcggtagtttacaaccacttttgactgctcttggccaaaacgaaccgccattgcgcgacccaacccttttgatccacctgttacaactactactttatcttttaaatctgtatacatcttgaagtcctcctaatttttctgcctgatatgtcttgctatactgtactaattataaatacagtttaggttttaaaaagagaataaacatttctctatctcttctttcttaaactgtcattcatttaaaaagtaacaaattcacttttgcctcttttcgttacttatcgtaactaagagaaataaagtagtcaaactttttgttttatcattcttattatttatttttatcacttactctcttcatctctatttcccgcaggatatggtttcacacttcccattaaccccacttcaaaagtttaaactttttcccttgcaattcttaaatcaatgtattatattgttgatgtatcaattattgatatgtcaaacaattgtccgcaatcgaaaatataggaatgacaataaataagtttaacgcctaaaaagaaaggaataatgactatgactatgactacaaaagactttaacgaaattgctttaaaacgccgttcaattaaaaattatgatccttcagtaaaaatcagccgtgaggaaatggaggaaattcttacagaagctatgcgcgctccttcttctgttaatatgcagccgtggcgctttgttgtaattgaaacgccggaaggcaaagaaaaattagctaaacttgcgaaatttaacagtgaacaagttcatacatcttcagctgttattgccgtgtttggtgacatgaacaacgtcgaatatgcagacgagattttcggaaaagcagtagagcttggctatatgcctcaggacattaaagaacagcagctaaatttctttaagccgatctacgaaaacatgccaaaagcagatatgaaagacatcgtgctaattgattcaggtcttgtatctatgcagcttatgcttgttgctcgcgctcacggatatgatacaaatccaatcggcggatacgaaaaacacttaatcgcagaagaattcggtttagataaagaacgttatcttccaattatgcttatctcaatcgggaaagcggcaagcgaaggccatgcttcttaccgtttaccggtcaatacggttacaacttggaaataagcagtagctagttctatttagtaaataaagggctaaaattgtgaagtaaaaggagattttctgatgaataactatcaagaacttacaaaaaaacagctttcattctttaatagcggtaaaacaaaagacgttgcgttccgtatcgaaacgctaaagaaattaagagaacttgttgtacgtcatgaagacgacattttaaaagcagtaaaagctgaccttaacaaaccagaatttgaagcaaaacgtgcagaagttggtcttgtgctaagtgaaatcgactttgcagttgagaatcttgcagaatggacagcggcaaaagaagtagaaacaccatctactcacgcaggagcaaaaagctacatttatcaagatccatacggtttagctctagtgattgcaccttggaactatccgttccaacttgctgtatcaccagtagtaggcgcgattgctgcaggtaactgcgtggtgttaaagccttctgaattaacacctcatacgtcaagccttcttgctaagatgtttaatgaaaacttccctgaagaacacttgacggtagtcgaaggtgaagtggaaacaagcacggctttactaaaagaaaactttgattacatcttctttacaggaagtacaatggtcggcaaaattgtggcagaagctgctgctaaacatttaacgcctgtgacgcttgagctaggcggaaaaagtcctacaattgtacacgaagatgcaaatattgaagaagcagcaaaacgcattgcgcgcggtaaatttgcaaatgctggtcaaacttgcgtagcgccagactacattcttgttcagcgaaatgtaaaagacgagctcctagctaacctaaaacaagtcgtaacaaacacgtacggcaaagatgtttcacaaaatctagacttccctcacgtagtgagccaaaagcattttgatcgtcttagcagcttcttaacaaacggagatattgtttttggaggcaaaacggatcgttctcgtctgtttattgaaccaactgttcttgataacatctcatgggaagacaatgtgatgcaagatgaaatctttggaccaattcttccagtcatcgtatacgatgaaatctcagaagtaatccaagcaatcgtaaaacgtccaaaaccattagcactttatcttttctctgaagatgaagcagtccaagatcacatcttaaacagcgtgtcattcggcggcggctctatcaatgatacgattaaccatatgacgtctcactaccttccatttggcggcgttggtgacagcggaatgggtgcgtatcacggaaaagcaagctttgatacattttcacatgctaaaagcatcttaaaacgttcaaataaataaagaaaaagccgaagtcagcgtctgacttcggtttttttattccttcatctgtttggcgatttgttcatattgctcttctttttttgtagaaaccgctaaatcacaaagaatatgcaaaaagtactttttatcttgaacaaataaatactcttcttcaaagcctttagaaatgtatacagcaaactcccaaatatcgtcgtaataagccggtccaatggcctcagcgagatttccaagcgttttgagcagctccatcgtgatgataatattccgtctcgcatagtgccggatattagcgaatccatcatataaaaagtcctcaaattttttatcaggaatcaccattcgtatcacgccgctgtcatccactaaataagaagaaaattgactaacttcacaaatttcccgaagaatatcgctaatttgatgaatggagttaaccgccgttttgaaatcatcattccccagtgatttaactgccatctccacaaacttcgtaatgatatacgtagtatcttgaatatcagtctgagatttccctacatggatatattggtgaaagacggtacaatccatttcatcgtgctctgtcgaatctctatgccaataataaaacaatacggttccgctgagcacataatcccctacttcacgctccatttttataactaaattatgctctttggcgcagtgaatcaatcggctgtagttcagcgtttgaatatagccggatgtttgaatacataccggctttttctctccttctggaaaagaaaattgttcgctatgactagactttgttcggtgaatctccagttcctctcgaatcgttgtcttaatcgcttttatggacgctgttttcatcgattgagtcatatgatttacttgcagccacctaacagaatgattaataaagtagacaaacgtacccgcactaaaaacagacagggctgtcgtcacaaacggaatcgcaaaatatccgtttacttgagagctgtttaaaaataaaaacacaaaaagtgtatacaaaaaactccctatgaaaatacccagaattcgctgagtagacttagaagaagcaaagttttttaacacgcgaggagaaaactgagctgcaaatgatgtaaatacaacaagcattaagttgaaggtaaacgtcgtaatcgatagaattcccggcataatcgtacttactaacgtattggttaaatccatgttgattgaaaaaaatgaaggaaccttctctcctactttgcagtaatagtcgagaaacagcgtcagcacagctaaaagaacagaaaaaaaagcataaattaagggactaaaccatatttgactagttaattcatctttaaaagcacgaggagaaagctgtttccttgccgctatccatctaaatgtattcatataaaaccttcctttttatttgtaaatctctagcttttttcttagttcccttaatttttctaattatgcttatataatggaaaaaatctattttttaaggtataactgtacaaagaaaaaaaagaggttgagacatacctaattaattcgatttaaatacgcacaaataggatacatgagctggaccgcttgtgacaccgcagttgatttacgtccaagacttcgtcttgcccttcaatcaactgctagaagtaactgaatgaatatatgaaagctatgttcaccacgtaaataaaaaatccgaacgcgtcggattctcaatcaagaatccatctcgttcggattttctttcaagtaacctaatcttatctcagcttttttttactcttatctttttaccagccccggctcgctccgccgcctccagagctgccgcctccccctccgcgaggaccgctgccgttgccaccgccaccgcctcttcctccaaatatgacaaggaagtttagcagaaattgcgtgatcgctcctttaaaaaagacgaagtctagaataagtaagcccacaataacagctgcaatcagcagcgtttgaagagttgttaaatgaacaccgctatcagagggcggagatgcttttggcactttttgttcaaaatctgttcctaaatcatactctttcaccacttggttataaacagctttgtatgtgctttctagcgccgtatcgtattttccatttttcaagttaggaatagcataagaatctaaaatttctcccgatttgatatcggtgatagctccttctaacccatatcctacttcgattcggatttttcgttcttttttagcgagcaaaataagaacgccattgttcagctttttatcacctagtttgtactttcgaaacgcttcattcgcgtactcttctacatccgcatcacctaatgaattcacggtaagaatcgctacttgagctttcgtttcatcatccaattttctgcccatttggtttatttcagctttttcctgatcgtttaataaatgagcaaaatcttgaacgtaaatatcgcctaccggatttggaatatcaggtgcagcaaaagcaacgcttaccatattacataaaagagacaataataaagcaaacgaagcaagaaatttcatcacttatcgctcccaaaatcaactttcggcgcttctttttcttcatttgttacttcaaaatacggttttttttcaaagccgaacgtacccgctaacatgcttttaggaaatctcttaaccgatttattgtatttcgcaacttcatcgttatagtctttacgtgctacagcgagtcgattttccgttccttctaaactatccattaagcttctgaagttttcattcgcttttaaatccggatatttttcaaccactacgagcaggcggcttaatgcgccgcttaactgttgattagcatcagctttatcttcaggagttttcgctcccgctagctgcgctcttgcctgagtgactgaatcaattgcttcctgctcatgcttagcatagcctttgaccgtttcgactaagttcggaattagatcagctcttctttttaattgattatctatttgggaaaatttattatctacatcttcctctgcgctaacaaggctattgtaagagctcactccgtaaattacaacaagcactaacacaatgatcgtagcgatcaaacctttgtttttcaatgtactacctcttttcttcatcaaaattatgtatctacttactagtacgaatcataccctaaaaagattcattttttaccaattttatttgtattgcacgtctaagtaagacatctcctaacaatcaatccctctataaggtgaaatacttttctctacctagtctttctatcaattagcacatgtaacccttctcgattttatcttgtttcacaatagaaaaaaaggaatacctcttggctattccttttttagcttaaggccatccttcaatcttgtatgcgactcggtgaaattcaggaaccgttacaaattgatagtcgttttttattaaatacttaataagtttcggcaatgaagcaacaatttgatctcgcgctccgctgccgtatcgatccccatcgtgcatgacaataagattcttttcttgtaaatttttaatcgtatatttgcatatggccaatggatcttcctcacgccaatcctgactatctacattccatagaacagacgtcattcccaattccttaatagcagcaagagctgtatcatttatcgaactgtaaggtgcacgaaatagcttaggagaataacctattattttctctatttgaatatttgtagaagtgatttctttccataattcacgtttagaaagagttgtaatatcaggatgactccacgtatgatttccaattacgtgctttgctctatgaatacgtcggatcagcttcggaaatttttccgcttctgcacctacgacaaaaaaggtcgcacgtacattatacctttttagaatttttaaaatagcagccgtgtaggctgagggtccatcatcaaacgttaacgcaacatattttggtgaattttgattcatatgttctccccttatataaaatagatatagaaataaacccctcactttgtgggtgtaagctgaggggcttttacggcgagataattttcaagagatgatgttatatctttttctgcatacaatactgctataggtaatagatttgttcaaaagaactcgccaagtagtcaaatccgcgaggccgcagtgtttcaaactgctgaataatttttattctttcctctgagcctccaggaagatcgtagagtttcgtcacaggctgtccattatttaaatattcaataattctaaaaagcatgacgcgaaaagcatgtttaaattcattatattcgccaggaaaacgttcctccagctgattatattcaactaatgttttatgcatatgcataaacggaagctctttccattcaagagataaaataagaacgtctatatgtgggtgtttgttaacaaaacgatagtggttaccccactgctctttcactttccgcttcgatattccatgttcttgatgataggcaactgtagagggatctaaaacaaactgtacgccatttttatacaatcgatacccaagctcccagtcttccgccccgtagccgataaacgtctcatcaaaaagaccggatttttttaagttcgcttttcttactgatacattcccacttaaaaaggcaatataaggtagcgtaaatccttcaagtcgctctccgaaatgttttagcccgctgttaagaaaataacgattaggaaaggataaacgttgaaaacggtttgtatcaatatcttcttttgttacaagaggacaaggaacatttgaatgctgcttcgtctgttcatagttttcatacaatcttctatactcaggatccctaccgattagttctttcaagtgagccatttgatctttattatagtctggcataataaacgtatagactccctcataatgcatggctccagtaactacaagatttgattcatgcatatgatgtttataatgattttcaataaaaacagggggagccagcatttctccgtctaaaaagattaaaagatctccttcagcatgattaattcctatattacgtactgaggaacgccctttattttgtttcatttgaatatatttaaatttgaacggaacatccacttcttttaaaatgttggacgtgttatcagaagacgcatcatcgactaaaataacttcatattcagcgtggggaaacgtttgttttgataaaccgtaaagcgaaagagaggtttgatgatacttattgtacgtaggcataacgatgctaactttaataggatgcttgtgattgttttttatactcattttatataatggatagtctgttatatcaactttattggtttcattcactgcgtcagctttgtcgtatggtttattggtttcattcactgcatcagctttgtcgtatggcttattggtttcattcactgcatcagctttgtcgtatggcttattggtttcattcactgcgtcagctttgtcgtatggtttattggtttcattcgctgcatcagctttgtcgtatggtttattggtttcattcactgcatcagctttgtcgtatgatttattggtttcgtttgctgtattaactttgtcgcgtgatttattttttttgttccccttattaactttgtcgcgtaatttatccactttgttagttgagtcgtctgacctattccctttattttttttatcctttgacttattaagtttatctttgagcttttttaaggaatgtggactattgtttttctttctaatataatactttccatcttcagggttgtagtagtattcatacgagtctattttaatcatcctttctttgtttttcctctatatactattcaataaatgaccgggtgcttgtacaatatataattttttttagaaaaggcgtatataatagattcgggaactttggtagatcgttctatcgaattagaaacacattctcttatcataaataagtgttctacttctcagtataaaaaagctgcttacaacttcatacgttataagcagctcccttttatagctgatttccatataccccatcaatattcgcaacagccgtttgatcaaatatatctgcatccatatttgtatttttcattcgcgcacaagcagctgaaatgtctccatatgttgagttgattccaacagatttaacatccgctgtgtgtccgttgtgaagaacttctccaaaattcatcgatccgtttcttgccataccattaattctcgtgttacagatgttaataactcctgccatgaccataccaccttttcttaaaatgaattcgtacatcgtatgctttgacaagcctatttgtgaaaagttttcaagaagtgaaaagcaaggtacaaatactagtgaaattattcatttcaccctgcttcacccaaagtttccacatgtttttatgctttttctgttacaataaatgcataagttatttttcatccatattgtttgaaggaggatacgtaatatggacgaaccaaaagatattcaacctaaagtagaaaaaagtttcgaactgattggcaagaagtggacaggattaatcatttatgtgcttatgagcggtcctaaacgctttagtgaattaaatgaaagtataccagccttaagcagaaggcttttgacagaacgaattaaagagcttgaagaccacggaattgttgtccgaaatgtcattccggaccgccctattcgttctgaatattcgctgactcaaaaaggaacggagttaggtaaaatattagggccgattagccagtgggcagaaagctgggtgcaagattaataaaactactccatagaaaggatgagcatcatggcaaatgttctctatattactgcacaccctttagctgaagacgaatcacttagcatggctgtggggaaagaatttatcgacgtatataagcaaacacatccagaagatgatgtagttcatttagatttatatcaagcagatattccatacttagatgcagacgtatttaacggctggaaaaagcttcgttctcactcttccatccaggatttatcaacggatgaacgattaaaagtgggacgattagccgaactaggcggacagttcgtactcgctgacaaatatatttttgtcacgccaatgtggaatttctctgttcctgcgattatgaaaacgtacattgatgcgattaccgtgtcaggtaaaacctttacatatacaaaagaaggcgctcagggattgcttaaaggaaaaaaagcgattcatattcaatcccgcggagacgtgtattcagaaggccctgaaatggcaagagaaatgggccaccgctatttagaaattatgatggacttctttggaatcgaagcgtttgaaagcattattatcgaagggcaagtaaaattcccggatcaaattccgcaaattaaagaaaaagcactccaaacagcccattcaatggccaaaacgttttaaattcaatagaaaagaaaaagacctcgaagcagatcgaggtctttttctttcctcttccctcccttatatttcccttgaaataatgatcaccttcctgctcgttttacgctgaaaatagatttaaaggaaagataaaaagctgttattttttgttactattaataacgcatgaagcaaaaatgtacgatttttctttttcgttttttaattatctacgttcaaaaaagatggttcctctaaatgaataacgtttaaaataacactttaaaatgaaataaacctttgtttttaaagggattatctacaaaactcaaaagcgtaatactcttaaaaacgtttgtgaatatgataaaacccaataaaaaacctttgactaaatttgttacgtaagttactattaataacgtagtagatgtttccgaacatattatctttaattcatgaaacaacatttatatattgaagacagaaaggtgaaaagaattatggcaaaagtattatatattacagcaaaccctaacgatgctacgcaatcattcagtatggctgcgggagatgcattcattaacgagtataaagaagtaaacccaacggatgagattgttcacgttaatttatatcaagaacatatccctcacatcgacggcgatgtattcagcggatggggtaaacttggaagcggcgcagaatttgacgcgcttactcctgaagaacagcgcaaagttgctcgtttaaacgagttaagtgaccaatttgctcaagcggacaaatatgtatttgttacaccaatgtggaacttctcattcccaccagtgatgaaagcatatttagatgctgtagcagtagctggaaaatcatttaaatatacagcagaaggttctgtaggtctattaacagataaaaaagcgtatcatattcaagcaaacggcggtatctactctcgcggccctgctggtgaattagaaatgggtcaccgctatatgcgcattatgatgaacttcttcggcgttccctctatcggaagcctatttgtagaaggacaggctgcaatgccagataaagcacaagaaattaaagaagacggcattgctcgcgctaaagaagctgcacgtacgttttaataaaaactgcaagcatgaaaaaaaggaacatctccccatgttcctttttttcatgcttgcatttatacctttgcttccccgcgcagcagcgaataaacatatgtatcaaacgggatgccgttttggtacaggtactctcttagcgtcccttcctttttaaatcctaatttgctcaacaaggcgatagatccactattttgcgtaaatacaatcgctcctatacgattgtattgaagttcgttgaagtcataagaaatcgcttcatgaacggcttctgtcgcgtatcctttgttccaatactccggaaaaagagcatagcttacgttcgctttcttatgctcagaagaccactcttgaaaccctattgttccaatcagcttttcttttccttttagctgaatcccccatttaatcaattgcttttcttcgtagcctttggaaaaattcttaatgatctccttcacttggttgatcgattctaaaggtttttgcccgtaatagcgcagaacctcttcatcagaaaagcattctaaaatctcaccggcatcatcttctacaatttttcttaacatcagccgttttgtctctaattctggaaacattttcttccctcttttctgcgcagcttatctatctacggtaaagcatactattctcctctcaactagcaatatcctgctaaaatcctacccgggaggactcatttcctatccaaatagtcgatttacagcggagatagtggtattttatatagtgggcataagttgctttttatcaacacagaggcggtgaacgcagaaatgaaccaagataaagaattgctgtccacgatacacgctcttcaaaaagagctgcagcaagaaaaagaaaaccgtgcgtatatgcaaaaagatatggacgaactaagaagcgctttattacaatcagaacaagtaaaacaaaacttaattgatcagctagaaaagaaagtcgatttgattttaacgttgattcaaaaaggagacacataaaggaatggatttttttaaaaacagcaaaatactatacactattgtggcacttgttattgccctcatcgctgtatttaccaacaattcgcccatttccctcattcagcagcatgaaaattcaagcagcacatcgagtagcacatcggacactacatcaagcaaccaatgctctgcagagactcaaagcgacaggttatttaccggcaaagaacttgtcttacaagaaggaaatgataaatacggatattgccacattatcgcgcatatgcaaaaaccaggcgttgacaactatcaaggtaaaagccaattcagtaagtatttaaatgaaaaacaagcgatgtctgttgctgaagaagtcatcaacgaaggcgaagacggcaccaacaataaatctggcaactacgttaaagaaaagtatattagttctttaaaccaagaagttagagttgtgtatactgactacagaggcaaagactacgactacagcgtaacgaccatgtatccaattggtcattaataataatgcagtgaataaaagcaggcgcatgcctgttttttttattttacctctatttatgatttacacctttaaaaaagtctctgtaaatttacagtagcacttttacctcttggacatattctaaatataaaaaagaaacagccccttgcttcttttttagaaagaggttaaaaaatgagtaacaagtacagagttagaaaaaacgtattacatcttaccgacacggaaaaaagagattttgttcgtaccgtgctaatactaaaggaaaaagggatatatgaccgctatatagcctggcatggtgcagcaggtaaatttcatactcctccgggcagcgatcgaaatgcagcacatatgagttctgcttttttaccgtggcatcgtgaataccttttacgattcgaacgtgaccttcagtcaatcaatccagaagtaacccttccttattgggaatgggaaacggacgcacagatgcaggatccctcacaatcacaaatttggagtgcagattttatgggaggaaacggaaatcccataaaagattttatcgtcgataccgggccatttgcagctgggcgctggacgacgatcgatgaacaaggaaatccttccggagggctaaaacgtaattttggagcaacgaaagaggcacctacactccctactcgagatgatgtcctcaatgctttaaaaataactcagtatgatacgccgccttgggatatgaccagccaaaacagctttcgtaatcagcttgaaggatttattaacgggccacagcttcacaatcgcgtacaccgttgggttggcggacagatgggcgttgtgcctactgctccgaatgatcctgtcttctttttacaccacgcaaatgtggatcgtatttgggctgtatggcaaattgttcatcgtaatcaaaactatcagccgatgaaaaacgggccatttggtcaaaactttagagatccgatgtacccttggaatacaacccctgaagacgttatgaaccatcgaaagcttgggtacgtatacgatatagaattaagaaaatcaaaacgttcatcataacccgttctagaaacagcagtatacaatcaaaaacaggtaaaccccttcccttctgacataacttataaggccacaagcatcataaaactcactgtttcatttccattcaccataaaatatagttaatcaaccataattgggctgtgaataagcttcatataaggaccttggaacatatgaataagttatcaaagctttataaaagttttataaatgaagggaagatatcaaaatgcataataacgtaaacgcaccttttagttctaatgaaaatatgccattctcacctgctatggctcaccatgcctatacagctcctgcttatgagcacatggttccacactgcgggtattcaatgccggactatggatatatggttcctgaatgtggatatggcgttcctcaccacggatgtaatggtttcgccattatcatcgtactgtttattttactcattattattggtgcatgtggttgcggtttctggcacgatgagtgttaacctaaaaaactccagtataaatactggagttttttcatgtcttaataggcggcaggcaccttcagaattctatagcgtttcatccaaatctaggggtctcaacttttcttcgatttctttgcgcttcggctctaaaaatggcggcagggctaatgtttggcccatcgtttcaagcggttcatcggtcgcaaatccaggtgtgtccgttgataattcaaataaaatgccgtttggttctctgaaataaagtgctttgaaatagtatcgttctactttaccggaattcggcagactgttttcatttaatcgagctgcccacttattgtattcttcttcatttggaacacggaatgcaacgtgatgaacgccaccgcgccctaagcgaactttcggcaaatcgggtctcgtttcaatatgaacttcggctccgcttccgccttcacctgttgcataaaccaaaatatctctatgatctcctgcaagagatggataagaacccgcgtagcgaaatcccataatatttgtcagtacgtcaacagttggttctggcgtaaccaccgttagcgtgaccggtcctaagccgataatcgcatgttctaacggaatgtcttcgcacttccacggcacgcctgctcttacccctttttcaccgttgtccgcgacaagaagcaaacgtgtaccttcataatctttaaatgctaacgtatcacgattagctcgtttagctatttcttcatattccactccgtactgctcaaagcgctctttccaaaaatgtaaagaatccgtacttttaacgcgaagcgaaacagtcgaaatgtcagatgcaccttgatgcgttcttgcaagtcccggaatatcaaaaaacgttacttccgttcctggcgtcccttctccatctgcataaaacaagtggtaagactgagtgttatcttgattcaccgttttttttactaatcgcatgcctaaaactttggtgaaaaactgatagtttttctcagctttccccgtcaaaatagatacatgatgcaaccctaacaattccatctgctccgcctcttttcataatatataaattttttaacttccactaaaattatctttaatttaattatctttaattaaagataattttaaaggatatacagcctgtttgtcaataacaagaaaatgttgtgaacataaaaaagaaactaaacacatagttagtttctctttatcttccctttaacaaactgctgatcttttccaacagcggttacttcttaagcacgcgctgcacattttgcttcatcagctccgcaatttttgtttcattttcacgagacgtctgctctaatttttctatgactaactgctgtctttcgactgaatgattttgacttatcttttgtttgccttccattttgctgatgtcgattttaaacccaatgattcctttgcttaaaccattcatataagcaggatcaacgtcatctagtgtatatgtactgctcgggctttcatatttctccaccatcttcctcagcagcccaagcagttctgttggttcttcaatcactttcatggtgccatacacgtgaacagcttcataattccatgttggtacagcttgattcgtttcataccaagacggtgaaatataacagtgaggcccttgaaaaacaaccaaaatttcttgattttcagcatctttccactgcagattcggacgagcaaaatgtccgtataaagctttttctttccggtttaacatcaggggcaaatgagtagcataaggcttttcattatgatacgaaaacaaagtggcaaatccattgtcttcaataaattcatacattatttgttcctcattcactttaaaatactttggaatatacatcggcgcttctcctttatctcttatttagtaaaagatataatactatacgtgtttgcaacagcgtcagttatgaactttttatggaggtcagcaaacattttaccatctatgaatggattttttaagaagcttatgctacactgctacgatgtaaaccgctattttttatatgtatttatttagcacatgatgcaactagatacatgtttgttaaataaagcttcagaaactcaaaaaaagaagagcttgtttaaaacagctcctttctcacgtttatctatacaattgaggatttttctctcgtttgataggtccgcctttggctatatgccactcaatgacgcggtcggtcaaacgatcgtataagtcatcttctaaatacggatcttctgccgaagtgagcaaggtgtgaacatcggcgtttatttcggctaacatagctgtgctgaatacgtccggatcattcaatacgtctagtatatataacaccagcatctcaaatccgccgtcccaattggcatttccgttgccttgagcttcacagcgaagcttttcaatggcccggatgacttctccttctacgatatccgactggccatttctcggaacatagtttaaccatagctcttttgcttcgtcaaaatacttcattctgaactccttctttcaaaactttattcctttttattcctttgattcattgccgttccaaaagcaactcctaaggccgttccgatcgcaatgccgaacccaatattatccataagcataccgagagaagctcccatcgcaacgcccatccctaaccccattcctagataatctgtctttttcttttcttcagacaaaaaaccactccttttttctactattttattgataccttttatacgtaaaaatcgcgctaaaagtttcataaaaatggaaaaaaagcagtctctgtaactgctttttaaatgatgagctgataaacggcctctccaatcagcaagaccgacgtaagcatgcagatcatcccaaatacgtacattgttttacgtgcagaaaaatacaaacaactcaacagggaaaggtatccaaaccttaagaaaagggcattttaaaagtaacgaaattttgcttacttaaaaaggatggattacattgacaccaaaccaacaggaatatctaaaaaaaatacatagcatacaagaaaatctagccaaaacgtgggctgaatattggcagcaatactccactccaggctcttggcagttttgggttaccttgggggctttcattttacctttagtcattctctattttttaattgatcgaaaaaaagcctttcacttagggttttatggatttaacgtacacgtttggtttcactatagcgacaccgctggagtttataacgggctgtggacgtatccttaccaaatcaacacaatcatacccgtaagctttagcctagatgcttcgcttattcctgtctcttttatgcttctttatcaatggacaattaaccatcataaaaattactatgtatatgcaactgttctttgtttgttttttgcttttattttcaaacctctattaacagggattggctttttccagctgcatgaatgggctacttacggttatttatttgtattttatctgggtgtgatactgctatcaaaatggattaccaatctgtttctttattttgaaaaacagcattaaatttgataagtgtcatcaataaaaaacgtaagcatcttcaaaagaccttacgtttttttgattgttttccttactagttgtctgcttcctcaaaaaatagaaggcttttcttattgttaatttagaacatgctgcatctagcaataataaaacttctgttagcagcaaactaagccctgcttaaattagcgttgtataagtccattaaactgcttaaatcatctaacaacgggcagtggcctacgcctttcataatttttaacgtcgcgttttcccctatgcctttcgcgatgtcagatgcatctcttgtggaaaccatcttatcttcatcgccttgaataaccatagtaggaatcataattttttccacctctcctgtcccttccacaacaccattaaaatcgtttgaaatattaaatctcatgagtgcgtaattgatatcaattaaatttcgctgcttgatcgttccttctaaatatttttcaaattgatcagcagacggcttattttttgtatataaaaattgtcgcagcatcatttttaaaaaccatgtgttttttgtttcttttgcgttttctaccattctaaatgcttcttttacttcttctttggtttgtataaagttgttaggaataggcagttctaggaacgttcttcttggaatggggtagcctttaatgttgacggagcttaagagaattaaatttttggcatcattcggatgatcaatcacatattgcatagcaactgctcctcctaatgaccacccgcttattgtaaaagcagacaactttaaagcatccgcaaacagtttgacatcatctgataagtctttgattgtgtggataggtgtatgataagtggagtctccaaatcctcttaaatcgatcgcataagctgtgatatgttctggaagttcattcattaacacatcccagttaagggaagaattcatgtttccgtgaattaacaaaagtacctcttttccgccttttttcattcggtaatttactgtttctccattcggtaattctacttttgcttgttctaaagcagatacggtcatcgctattttcctcttttcttatataattagaacgatcggtagcatttattttttaataccctatttatcaagatttaagcagttagaaagaagttgtgcaaaagccaacataatgctatgttattctacttgctaaaaaagacagccaaatatgcgattcggctgcctttttataatgaagaaatatacgaatgagcaacaaggccattactttttcggtgcgtctaatgcttgataggcaagctgatatttcccgccttcagccacttctgcatggtacagagctttaagagcaaagtttttttcaaggctgtgctctttcatcagtccattcagcttaccttgcagttcctgattgtctttaatgagctgcttcatctgtgattttaaatatttcatggtgttttccgctcctttcacttgatgaatatctatcaagtatatcacttaaggataggataatggtaaaacgacttacaattgagcgattaaatctgtacagctctgttttttaagcgtcctacaagcggaacgacgatgatgccagcaataacaacttgcatcacattccccggtatagagccaagcggaacgatccagttaccgtaaagaatcacttcggcaaaatagtagcccacgatttttacaatcagcgcagcaacaactgccagtgtgttcacaagtgctcttttaccaggtgctttttcagatataagacctgctaaaaagcccattgcccctacgataataaacgtaaacggcgcccatgctgtccagccggagatgaggtcgaataaccccattccaaaagccccggcgatggctcctgtctttttgccgtaaataaaggctgctataaaaagaggaacgttgcctaaatggatgaggcctccgttacccatgattggaagcttgatgttgataaacattgtcgctacaaacgtcagtgcgataaaaagtgcatgcatagataaagctttaattttggttgattctctgggtgagtatgttgaattcatctgttgacctctttctttttttactactatcatactcctaattacacacttaataaatacgtaaaactatttatttagtaaggtatatcattctagcagcacacagggatccgccaacttcaaaaattgtcctatctgttcttaaaaaaataaagctgcttctgcttcctttagcagactgcggcgcctaatttttgttatggtaaagagtctgttcgggcataatatgagcaaatcgttctttttcaagagttgacgaaggctgataaatatgagaaattatatgtttgtagaaatgaatggaataacctagaattccagcgaaacctgttactataattgtactgatattgaccaagttcgttcagattgtggcagtcatgatttttacatacagcaagcaagttataggaggagcaagaatggataataacgatattttaattagattacgatatgccttggatttaaaaaacacagaaatggtagagatctttaatcttggcggagtagacgtaacaaaagaagacgtattaaagatccttacgagaacaccggacgaagaggacgaggatgcaattcatgcggacgaacacatctcgtgcagtaacaatatgttagattcttttttaaacggttttattacctttaaaagaggagaacaagaccctaaaccagggcaagcacctccagcgccggttcaaagcaatcaaaatatgtataacgtcttattaaagaaagtaaaaattgctttgtccctaaccagtgaagagatgttagaagtattcgacgacggtggcatacgtgtatctaaagcagaattaggtgctttattacgaaaaaaaggccacaaaaattacaaaccgtgcaaagagaattttgctcgaaaattcctaagaggcttaaccgtacaatatagaggataaaatgatacacactttttcaaatcagagtattcattatgaaatacgatataaaaaccgaagttcttttgcaatcaaagtagacggatacggaacggtcgaagtccttgctcctaaaggaacctctactgaacaagtacggatgttattagagaacaactggacattgattcagcaaaaaataaacgaaatgaaagatagaacgcatggaccacagaaaaaagtctatgaacccggagaacgctttttgtatgtaggaaaaaactatccgatacagattcatcacgattcgaccattacaaaggattctgtagtgtttgaagcgaacacgcttcagatttatgtcaatcaacacgacaatgaagcgataaaacaagcgctcaaacgcttttactatcaacaatgtaaagcgctagtaaccaagagtatctcctcctatcaaaaacattttaaaacaaagccgcgctccatttcgatttccgatagcaaaaaagcgtggggcacgtgtgattccaagcgtcagctaacctttaactggcggctggcaatggcaccgcagcacgtcattgattacgtagtcgttcatgaaatgtgccacatggttcatatgaatcacgaccggtcgttttggcgtcttgtcggtaaaatcatgcccgattatcgtgaacaagagaactggctggaaatgtcgagctgggaaatgacagtgtagtggctacataaaaaagagcagaagccccggggcatactgctctttttttatctttaactatagcgatattttcttaaatcttttaaaatcgaaatttcttttaacaattcttctccgacgtttgtttctaaaaccatttttctttctagttctttatcaaccaatcgctttacggataaaacgtccgttccttctaataaaatctcttcttttgaattaaagtgtttatgagcgactagctgcataccgtaagaattatataataatgtatagccagcaatccctgttgtagactgatacgcttttgaaaaaccgccgtcaataacaatcatctttccatttgctttgactgggttttctccttcaatttctttgactggcgtatgaccattaatgatatgaccatgatccggattcagcttaaattcttccagaatgtttcggcagacttcttcattttcccgtaagtagtaatacggattctttttttctttatgcgttgctttatcactgataaaatatcgttcaaacgtcgtcattgcgcgtttcccgaaaagtgatgaatattcccctgtccataggtaccagaccatatctgttgccaaatcatccgtttcttcaggatgtgcaaaagcctcttgtaaataatgttcaaacacatcaagcaagttgcgtcccgcatacgttttatcttctatcgtcattttttccatgtttccttcttcatctaaaggaatgcagccgtgtattaataagtttccgttgtattttaaataaaggctgccttttttcatcagaaacttcatatgtctcgccagcttttccgaatgctgcacagaaagcagcagtctttccattacctgctcttcttcttctaatagctgatcaggctgcgccggattaatcgttgcaaagcagctgttttctagctgatacgtgtttccgtatatcgtaatttcatttttatcataatcaattttttcaagcaacagcctttctgacatattaaagaaaggacgtctttttataatcggactttcaagcttgaactgaatcatcgcaatagcctgatgaattttcgtaatttgtagtcgctcgtgatcggatagtttatcacttgagcttacctttggtctaaaagcaggattatcatcataatatttctccgccaggttaagcaggggtctcaggttaatgccatatacgtcttcaataatatctagattgtcgtatctcgcgcagatacgaataatattggcaagacacactttcgaacccgcaaaagcccctagccatagcacatcgtgatttccccactgaatatcaacggagtgatagttaatcagcgtatccataattttatccggttcaggtccacggtcataaatatcccctactacgtgcagatggtccacaaccaatctttgcgtcgtataagcaagtcctataataagcttatcggcttgtcccagagaaataatctgctgaacaatctttgtatagtactgttctttatttgtaaattcatccgttttatatagcagctcttcaataatgtacacaaattgatccggcaatgctttacgcagtttagaacgcgtgtatttagaagaagcgtacgaaatgagattaagcatacgatcaatgatttctgtataccattgatagagttcctttttgtttcgaaactgcgctttaatcaacggtaatttttcttcaggataatacactaatgtcgcaaattcattgatttctttgtctgataatacatttttaaaaaggtctttgattttctcttttacatttcccgaaccgtttcgcagcacgtgctgaaaggcttgatattcgccgtgtaaatcactgacaaaatgttcggtcccctttggcagatgaagaatagcttcaaggttaataatttcggttaccactttttcttccgtatcatacttttgtgcaagtaaatctaggtattttgtgttcaaaactatgtatcccctttcaacgttcaccatttagtataatcaccgttataaccttgtaagataaattgtgatcataatgtaacgcacctcttatttaactcttttctctccacgcctcacccctttattttaacctattttacgtataggtaaaatggtataaagtctatttgtttataaagattaaacgatcttgcccctttaaagatgacagctagctggtaacataaaaaaacctgctgatctcagtcaacaggttcgatacatatgaaagaagcgcacataattaaaaaagtttactccgacctctatataatagcaggttttttcttccctagctgtgagatatctcacagcgttaagatcttgctggtgttacaataaaaatgacctttctgagacaggaaaagtcatcctttgtattatataagaatcatcattctgttgaatctctgttcttttatgttcagagattttttctgttggatttgttagatgaagagaaaaatcaaggggaaatcatcacattaatgtctgctaataccttatccaccctaattctgaccgtttcactatttcagcatatccggttttaaaacccgcccctaagcaatttagctatacaacgggcgccctgtactaaataaattttacgatataaaaaagcagcggatgtaaaacatcacgctgcttttcttatctctacactctaacctaaaagtgaattattgcagagtgttcgtacgaatgtagtgatttgtgaacttagtgaatattattctttctgaaattaccgcctttaacttccgctacgtcatataccgtaacaaaagccgttgggtcaatttcattgatgatttctttcattttactttcttccaaacggttgattacgcatgtgatttccttaaatttttcatgagaataaccgccgtaagcttctttgtatgtagcgcttcgacctaaacgatcacgtattgtctctaccattaatgcaggctgagaagtgataatctggaaggttttcgatccgcttagtcctacctctacgatgtgaataactttggatgcaataaagtatgcaattgcagaaagaatcgcgccttgcagaccaaatactaatgaaacgaaaataaatacaaatgcatttaagaacaaaataagatcacttgttccaaacggcaattttcgagaaagcagtacggccagcatatcgatgccatctaaggccccgccgttacgaagtgcaattcccattccaaacccgaggataataccgccaacaacggttacgagtagtgtatctccttcaataattgctggagtgtgatgcatgaggctagtaccgacagctaatgagacaattccgaggatggaaaatatggcaaagcttttcccaatttgttgatatcctaaccatacaaaaggaatgttgataacggcaatgagaaccccaagtggcaagccaaataggtttgaagcaacgatgctaatgcctgttacccctccatctgaaacatgatttggaattaagacagtttctaagccgtaagctgcaataattcctccgataatgaccattaacgctcggaaagcaatttttagccgcttaggcctgtgatgttttttaggtgtgttcatataattcctcacttttaaatgttttttactatttaagtgtaccacaaacattctctttatttgaactaaggaggcttacgtatcgctttttagctcacatagtgcaaacatagataaaagagaaattctagctgtacagactctatccttgcaataagtccctatttctgttaagtttaagaagaattatttttgttcggtaaagattgataagttacataactttcgtctatagatttgagcaaggatagtaacacaatgtgtacgtgtcacactaggaggcaacaattatggaacaaggtaaagtaaaatggtttaacgcagaaaaaggttttggattcatcgaacgcgaaaacggagacgatgtatttgtacatttctcagcaatccaaagcgaaggcttcaaatctttagacgaaggtcaagcagttacatttgacgtagaacaaggtcaacgcggccctcaagcttctaacgttcaaaaagcgtaatccatcataaatataaaaagacagactccatcgagtctgtctttttcatttccttgaaaatgtcataataaaaccctatccactaagggatagggcttattaatacaaaaatagtaatcggtaatacaaatggtaaattcagtatagcataatatagacaaaatccaaactataaatcaatatttattcatgtttcattaattcttcttcaaagaaaaacgtacttggatatttatccactgtataagagtatcttttcatgttttttacataatggctttttaagatgatcactctttcattagatgcttttatatttacaatttctccattagtaaataagcttatactcatatctctcaccctctctcctatcaaaaataatcaaatttttaactttatttatcgggaaatataatgtgatctctcaatggctaatccagcgaaggttagttatttttgataccttcaggcgtatatgtactcctaaagcatacagttctataaccataaggggttttttctattttttgcgacatgggattttacatataggtagctctgctttaatagcattctgtctccaatgtctgtacttattttttaagtaatctttttaaattattaaactccaaagcaaaaagacccctatgtggagtcttttttgcttttaattatgctactttatgaacgttagcagcttgtgctccacgttggccttgttcgatgtcaaacgttactttttgaccttcttctaatgatttaaagccttcaccttgaatagagctgaaatgtacgaatacatcgtctccgccttcaatttcgataaagccgaagcctttgtctgcattaaaccatttcactgtaccttgttccataattgttgcctcctggtgtggaatactccacggttgtattactacccttgtccaaccatactatcttaagataaaaaattctatggaagagatttctcttctctcaatcttataccgaacaaaaataattaacttaatcgtaacatacagaatcaaaaatagcaaatacagggaatgagataaaggattgaatgataaaaagagccttctctatgcgatacaaggagaaggctcttttttagtgttcatattttgcgcagcagttaattcagctgctgctgtttatttactttatttttctgtttgctctgtgtgccaccataatgaatcttttggattttcaactgcttcattgtattcagatttagaagcaactgttgggtatgaacctttgagtgattttcctgccgtgttcgcaaacaggaacaagattacgaagaatccaatgatgctcacaatcgttaaatagaacgctggagccaagtgattgcccgttgcgtgaactaaccatgtcgcaactaatggcgtcgttcctccaaagatagaaactgaaacattaaacgtgatcgctaatgttcggtagcgaatatctgtgtagaacattgttggcagcgttcctggcattgttccttcatacgtagcaagtaaaacacctagaataagtataccgattgaaacaaatactaaaccatttaagttgattaaatagaacgaaaaggctgacagtaagctcaatccacctaaaccgattaagaaaactttcttgtttccgattttgtcgctcagttttccaaacataagagcaagcggcaccattaaaatcataactgccgtaattaataccgtaccaactgtgtttgataaaccaataatttcattcaaataagaaggcatgtacgataatagcatatagtttgtaatgttaaagaaagccacggctacgaaacaaacaaacacatcttttttgtgattttttaaaatagagaggaagctttcttcttcgacttcgtcttcgttggaaagttcattttcaaaaataggtgtttcccctaaacttcttcgtaaataaaaaccaataagtcctaaaggcaatcctaataagaagggaattctccagccccatgaggccatttgtttatccgacagaataaaaaatagtaagctagctagcagtgaagcaagaatatagccaacaagtgtaccgatttctagtccacttccaagcacatttcgcttattgtctggagacgattctgcaatatacaccatcgcaccggcatattcaccaccagttgaaaaaccttgaatgattcgtgcaattaataaaaggatgggtgcccatataccgatttgatcatatgtaggtaacaacccaatgagtaatgtggaaaaggccattaaaataatggtggtggttaaaacgactttccttcctaacttgtccccaattctaccgaatataacaccgcctaatggacgcattaaaaaggcaatcgcaaatgtggcaaatgtgaacactaatttgagctgatcattttcaactgcgctaaaaaagttttgactaataattacggctaaatatgaatacaagccaaagtcaaaccattccatcgcgtttcctactcctgtagcaaagacgctttttttagctttgtcaatatctacgacgttaatttttttcttattaaacttcatttcattacgtcacctccgcggtatacgattatacaagactgagtagtaaagtcaaatttgacttactgtatttcacacttaaatgtattgtaactctctttatttttaagtaaaaaacgaaaaatattcatgtgatgttaaatattaaaaaaggttatagctaaagggattgaagccaaaaattgctgagaaaggaacgctaacaaataaatgaattaaaaccaaaataaactttttttatttcaacgtacaattcattgctatttaaaaaacgattttcacctaaaatagggatcgttttcgatggaattacagtcgctgaaatagtaacttgttgttaaagagagcgcatctggtttactatgtgcttggtagcaatttccactcaggttatctgacaattattgttacaacccattagatataagctttattttgtaatagatacactgtttctattacaaaaattatgtagccttaaaaataaatataaagctcgttctaacaagtgcagcaatggatgattcggtccatagaataaaactttaagagttggctgggttcgagggataaaaattcaactcctttctccgtataatcgttcgtggcttcaagtaagttttctactgtaaaagcaagctggtttacagtgctacttttgtcatattcttcaacttacgtaatatgccagctccactccgtcaccacgctgtttttccggatagaaagatactctctttcttctcttagataccccataagacgaactttaaacctaaatacccccgtatagttttgaacataaagattcacgcttattacatttttttacattagataaacgttttatctgcgttaacataaaaaatagaccttcgcttagaagaagatctattttttttacttgctttattttttagtaaggctgccatttcgctctaaaacagggacttcaatatctaccgtgtttggatatttaactccaagccctgtatttaaagccccaaccgtttcgttttctttaatccagccttcttctcttaagcggcgtgcagctaagaatgtagcagcaccttcaggacaaatgaacgaaccttcaagctgcgcaacctttttttgttcttccacaatcttatcttcgtccaccgtaatcgcgcatccatttgtattgtatacggcctctaaaacaagaaagtctccgatcgcctttggtacgttgataccaaaggcgatggttgaagaatccggccaaaattcagattcttgttttctttcattccacgcttttacaataggcgcgcagttttcagcttgtaccgcaactaaacgaggaaggtcacctttaatccagccaagctcttttaattcatttaacgctttatagatgccgattaaaccaacgcctcctcctgttggatataaaatcacatcaggaagattccaagaaaactgttcagcaatttccaggcccattgtttttttaccttcaattcggtacggctctttaagcgtagaagcgtcataaagaccccaggctttaatagcttcaccaacaattttacccgcatcgctaatgagtccatctactaagtaaaggtcagctccagcgacagcacactcatttcgtgtaataacaggcgcatcttttggcatcacaacggttgcttttatgtcagcgcgtgacgaataaagcgaccaagcggctccggcattgccatttgtaggcatcgctaactgttcaacgcccagttcttttgcttttgacacccctacagcggcgcctctagctttgaatgatcccgttggaataataccttcatctttcatatataagtttggaatgtccatttctttccctagcttaggcatttttataagcggagtcatcccttctcctaaggaaacgacgtttttaggatcttctactggaagcagctcatgatatctccataaatttggttccctgctttgaacatcttctggagtcaggttagcttttaatctctctaaatcatacgctactagtaaaggtgaaccacattcacataattgatgtttttcttttggactatattcttttttacatttaggacaatataagtgagaaacataactaaacggcatcatacacactcctttaaattctgtaaacatactaccctatatacattataatatatattattttatatacattataatttatattatttttatcagaattgtaaggtatgatttacccataattttttgaacattaaaaaatcaataaatccctattacattaggatttttattctttttctcactttgtttatattctttttttaaagtcaacatcagtgaatttaaataaaaatgcggaaagaaatttaattcggactttagttataggattaatcatttaagaagtagtaactgctcttcgaatttcaccacagaaacgtttactgctattcaaaacaaaatttacttagcaagacctttcttcaactattcagcttttatacatatgtttaactttgtcaaaatatcttttttataagatattgacattttaataaggtacctttactatttgataaggtaccttatcttttttgagaagataaaatttttcatatagataagtgcagcgctaaattagtaaggaggcttttatcgtgaatgaaagagataacgaatatttacacgagcaagatttgattgatcaatttttcagattccagagacagctggcaagataccagcgacactactttgttaatcgaagagatgctggagcactaggtgatcagcaccgggggcaaggacggatattaaaattattaaaattgcagcctaaaactacacaaaaagagctgtcgtacttactggatatgagacctcagtcaataggtgaattacttagtaagttagaaagaaaaggttacattgttcgtacgccatctgagaaagatcggcgagtactttccgttgagctaacagaagcgggactagaagctatcgaggctacggaggaacaagacaataactcaggcatctttgatgttctttcagaagaagagcaagatactctttcacatttaatgcaaaagttaaatacttatttagatgaagaaatgttaaaacaaggtcatgatgaaaatcaagaatttcgacgccataatgacctacgaggatttggacctcaccatagattttttggtggtgatccagagcatggtccaagaagttttgggcgcggaccttggggagacggtgctgaattcagaacaccgagatttagaaaccgaaatccccgagagactaatagagataataacgagaaatgattcacatgctgtttagtgatcatttctaataatttcacgagaggaaacgcaatatggaaaacatctcaaatgttggagaacaagttttaaataataaaaacaataaaatactagtaatgactggattaatgattggaattattttttctgagcttgatgaaacagttgtaaatacagccatgccaacgattatacgtgatcttggcggattatctatgtatggctgggttgcaggcatctatatgctagctctatctgcttttatgcctatactaggaaaattagccgatttatttagtcgaaaaaaagtctacttcgcttctatggctttctttattggaggctccattatatgcgggctttctcattcaatgattatgcttttaattggaagaggaattcaaggacttggcgcgggtggcctcatgccattagccatgacgatttcgagtgatttgttccctgttgaacaacgagcaaaagttcaagcgtttatgggaccagttatgtttatccctatgcttttaggtccgctaatgggaggcttttttgtagatcaagcaagctggcattggattttcttcgtgaatattccagtgggattaatagcagtcatttttttagcaagtgggttaaaagaagtacatgaaagaaaaaaagtaacaattgattgggcaggagctattcttctagtagctgcaatcatttcgttattaattacgcctgttttagtcgagaatgaaggatatgcgtggagctccccgttcatcatttcgctactatgtgtaggcgtacttttaattggatttttcatttgggtagaatcaaaagtggttgaacctatcgtaccgctgcatctatttaaaaatcgtaatattttagtattatcactgcttgtttttactgtaggctgtggattaatgggatcattctcatctttcccttactttgcacagaacgtattaggccttacccctactgaatctgggtatttaaccttgcccatgatggtaggtgctgttgcaacttcaatcgtttctgggtttctattaacaaaagttcggtaccgcgaattgtttgtgatttctttcattatgcctgttatcggcttttatttattttctaaattaaatattagtaccactaccctgcaggtcattattttcttttttatcaccggtcttggtttaggcgttatgttcggtggagataacttaattgttcaagaatctgtagaaaaagaacacaaaggaattgccttggcaaccgttccattgtttcagtctattggcgcaactgtcggagtaagtatgtttgggacgctattatcttccacacttacgtcaaatctaagcagtttaggcgatgaattgcctaaaagtatggcaaataacatgaatagcctggcagcaggaggaattccaaacggtcttactccagaattatttataaaaatcaaagttttatttattgaatcgtttcagcatatctatacttacgcatttgtacttacgatcattgcctttgttttatgcttctttctaaaaaaagaagtgctatcttcaaaatcagaagagtaataaaagagattcttgctttagccaaaggtgtatttgtacaacagtcgtttccaaaaatgaaaaagccaattcgaattggctttttttattaatagattaaaaatttcactttagttatttctgagtcatattaccatcagctgtactcttgattgttctttcttttttaaatagatctattcgtactctctttcttaaagactcctattaacagcataacgattcctactaaaaagaaaaaagggaacaataacatcattaatgcaactcctgcaaaaccttcgcatccccttaaatatctttttattccattattcttactcaaacctaaatccaatcccaccgtctacaataatgttttgacccgtaacaaaagatgcgtcatcagaaaggagccattttactgcttttgcggcttcaatcggatcaccaattctgcccagcgcgtttagcttttgataggattcattgagctttgctttttcctctgaagatagatttgaaaatctttcttctaacataggcgtacgaaatgcacctgggcaaaaagagttaattcttatattttgatggccatattcttgagcaactgatttcgttaaagcaatcacaccgcttttcccagcagcatatacgccagtccccgctgaacataaaatcgcgtccattgacgatgtattcacaatcacaccgctgttttgtttggtcattacctgcagctgatacttcatacaaagccatacactttttaacgtaacgtttattaaatggtcaaagtcttcttctttgaattcatgggtagcattagaagctgcctccgtgttagccgcattattaaagcccacgtcaatttttccaaatgtagagtatgtttggctaacaaggtttttaacatcttgactattcgttacatcggttttgatgaaaatagatcgaggagaccactttcttaatctagaaagagtttcttctcctttttcactatttctagaagcgatcacaacatgcatgccctcttttgcgagtaattccgctgttgctaaaccaatacccgacgttccacccgtaatgatccctactttttcttcaaacatatagttctccccttttgcgtttaataagatcacaacaaattaaatttagcagcattagtcataagagttattcagctttgggtagattaatacctgcttcggaactctaaaaagagagtgagaccacaactaaagcaattcaatctaaaagtgagcaaattggagaaaggagctagtataggtcacttgctaaaccgctgttgatttctgtgcaagacttcgcttttcgcgggccgccggtgagcctcctcgtcacttacgttcctgcggggtctcacctatttcgcttttcccgcgggagtcttcgccttgccccccaatcactagaagcacctacccacacaaacgaaacctacgtccatcacaacaacaaaaaatccgaacgaatttgattctccatcaagaatctccattcatcgttcagatttttctttaactaaaatactgttgttgcaatctcttttgactagccactaacttgatgataagaaacagataaagtagattttcgattccataaataaaaggcgtatccgcttaaaaataaaagcagcatgtaattaataagtaaagaatcgttagcttcaacagggcttgtaaactggagaaaattatttaagccgtgaaatacaatcgtcactccaatcgattgaccgttaacgatcagcaaagccagtaccaactcaataacaaatgcaaatagaatttaaaaaattgtatttgctaccgattgaccgcttagcatattcaaactgtgcgtaaaggcaaataaaaacgatgatagaagaaccgccactttatagctttttgctaacagcagattaaggataaatcctctaaataccatctcttctacaaatgctatgactagagtttgggtaagcaaaataagaacaagatcaacaatggaacttccgtgtacacctttgttcccaatgaggataataagcaaatataaaagaagcggagaaagaaacaggattcttgttttaaacgacatgttttgttgaaaggagaaaaaatgcggccacttttttgtttttgttagataaaatgctattccaatcgccaaagggacgattcctaaaaactgaagataatgtgtagtaggatgcgtcatgctcacgtatgcaccgtttaccacaaaaccctgcccacgtgacataatcactgaactccatttttttaccgcctctaacaagcacactaagcgcccaattggaaacacttccttcagacgttttgtctatacacctactggctaaagcgtatgctcccactcgaaataagcaatagcttactaaacataaaaaagatatggtcataaaatttaaatttaactctttcacctggtacacctcattatttttctactatttcatcggatggcttacgcagcttgctcttttatccttgttcgtaaaaatcctttttgatatctcgcaaaagttttaagatacctttataaaaacaagcaattagcattccagcgatgttggtcaccatcgtgattgtaagattgccgataatcaggctaagtaaagtaccaagaaacatgatgcctattccgatataaaaacctgggtgaagcagttcatcgtcgtcgtctttttcttcttcccgaatatttattctgctttgtaatgcagcatcacttttaataaattcatcaatggttgttccatagatgtcccctaactttaaaagatgctgaatttcgggatagccctgattattttcccacttatgtatgttttgtacagatacccctacttgcttagcaacctcttcttgagacatcttttgttcttctcttagtttttgcaactgatttcctaacctcaattcattcacctctatgactatagcagcgtgtaaacaaaatttgcttgcactacgttttctcgtcttctacaattctaacatattgtggtaaaaaagaaagaaacagttaataaggcgtataccaaaacctaaaacgacagtaatgaaaaatagtgagaattctcatgtgtaaaaatgaaagaatgcacttttatctccatccttttattgtttatactaaatagtggattgtacgaacatccacataaaaaaggaggaaacatgacgatggaaatgccatttatttatatattggttatcgctcttattggattcattatttggagaagggttaaaaggagacatagacccattaaaaggaatggacttggtatattagctcctattttgttcatattaattgcattttcccttagtctaagtcagctgatgcacataccgggccagccctttcacttacctccctactgggaaatgctgattgctggtgtattaggtgttatatttggacttattatgcttagccaaacggactatgaagtaagagaagacggcttcatttactcaaagccaaataaaaattttaaatatgtgattattgctattatcttcataagaatggctttgagccagtactttaaagggttagattcgatagacttcgcggtcttaacaatgacgctagcctttatatatattgttatttggagagttggcagctatctaaaattccgtaaattaaacggtgatcattacagcgtaaatgctgggtaatcatcaatacgaatggtccttctttctgcttggaaagaaggattttttgtcatagggagtaaaaggcccgcctgttgtgtaagacaataaatatgttgtataacgcaatatgtgttttttataacggtagtctatatataaaaataaaacagattaaattaaaaatgtacctggtcacccgctttttaatttacaggtagattatgaaaggaatcatactatgacatttatcaattctgtaacaggcccagtcaacgcgtcagaactagggctaacgttaatccatgagcatatgcgcgttcgttctgaatctattcacgcacagtttcctcatttatataatgagaaacaagaaatcgcaaaagcagtagaacaagtaaatcgtgcaaagaagctcggagtcaaaaccatctgtgatcctacggtgatggaacaagggcgcgatattcgttttattgaaaaaattgcccgtgaaacggacactcaaatcatcgcagctacaggaatttatacgtataactacatccctacccattttcaaactcgtagcattgattacatggcggacctgtttgttcgagatatcgaagtcggcattcaaaacacgtcgattaaagcaggctttctaaaatgcgctacagatgcacctggcgtaacagccgatgtagaaaaagtaatgcgtgccgtcgcacgcgctcataaaaaaacgggcgtgccgattatgacccattcacatccggcaagcggcacaggcttaaagcagcttgatatcttacttgaagaaggtgctaatccaaatcaaattctgattggacatacgggagatacggataaccttgaatatatttcaaacatcttaaaacaaggagcttttatcggaatggaccgctacggtttgacaagagaatgttcaactgtaaatagaaataacacggtcattgagttagccaaacaaggatactcaaaccgcatgtttctatcacaagattactgctgtacaatggactggtttccagaaggcgtaattgaagaacgttttccaaaatggtcaatgagctttgtgttagaagaagtcgtgccggaattaaaaagaaaaggcgtaaccgaacagcagattcagcatatgctttttgataacgcccgctgctggtttgaaggaaagtaattgggatattctttttcattactactaaaacccccactgtctaagccgaccgtgggggtttttacgcgtattattttatatacttatattaaccagtttttcttaatagcttttgtttttcttgactctttttcaccataaagtgtgcacccgacaggcataatccaacggcgattccaattgtcaggtttgtaaacaccgttaatgaaaatgtcgtaagtaaaaccaatgaatgaaatgatttttcttttaccacctttgagaactgttcttttttacttatattccacgctacgaccatcaaaactggagcgagactggcaagcgctacgtatgaagcgtacggagcgagcactagcagcacaatcaacacaaagatagcatgcgtgattcctgcaattggagaggaagcaccgtttttaatattggtaacagttcttgcaatctctcctgctgcgggaatacctgaaaacatcggcgttaccatgtttacgattccctggccaatcagttcttttttgctgctgtgctttgattttgtcatttcatctgcaacgcgagctgtcagtaaagattgtaaccctacaagtatagcaatgacaaatgcagaaggtaaaagagtgaccaccctctccactgttatatctggaaacgctggcgccggaaaatgacgaggtatctctccgtaaatggaaccaatggtttcaaactgattggaaaagaaaaaagatgccaagcccgttgatacaataattccgagtaaataagacattcccagcgacttaggcgaaaagtaaagaacaattaaaatcgtagctaagcacaatcctgctgtcgcgatactatagatgttgatgaagtgtaaattaccaaagatctcttttatattcaaatgaaaaaactgaaatttgtcaatcgcgtgcagcccaaggaagtttggtatctgcccgctaaagataatcagcgcgattcccgactgaaatcctataataatagagggcggaaaatacttgattaaagctcctactttacatagcgcaaagataatgaggagaattccagacataaagccggcaattaataagttttcatagccatattgcaacacaatccctaataaaacaggaacaaatgcaccggtaggtcccgcgatttgaaacctacatccacctaaaatagcaattagtaagcccgctacaatcgttgtataaagtcctgtaacaggcgatattccagaagctatcgcaaatcctaaccctaaaggtatagctataatgccaacaacaatacccgatagtatatctttcttcaaatgctgcaaggagtaatttcgaaaaacctctagattcataagtgtacatcagcctccattttaagtagtgaggttacccattcgtattttcgtcatacaaccctattgagctttcaaccactcaaaataaggtgggctactcgattacttttattttaaaggagacaacttacaaaaaaataaagaggaaattagaagtttcttagcaagttattaaaatttccttaaaaattattgctatttattcttttagttatttttgatgtattaaatttctttgttattaatcaagcacgctaactagaccctatagtaactatagagtctatgggccaggctgcacagatttttaagattaagtagactacaaggactgcctccagtggtttaattatatcggaattcataggacgcttagtttcataagtccgattaatcacaaacttgaacactttaaaatagtggtcccgtttagtgctgacataccataaacaaattacgggaaacctaaaaaaacagaggctttgaattaataagatatataataccaattcctttgtaacttttttatttctttaaacttcagaccaaaatcgccgatgaaggtttacggttgtttgggtcataaacaaaacctgagaaatggccgaagagcccactgtttgtaaagaaaagtatggaaattgcctttcctttggtttctactgcaacctcagctcgacctctagatacgctcgcatactctttaggtaaagcaattagtgatgagcggtcgggttcattggggaaaaaattgaacgatgggtagttggcttcatccggtttcaggacacctttttatattttagttgccacttcttccctcttctgctgatgaattatcacatatccttttccttcttttcttcttattaaacaagtttaaccaaatagtcagcagcgcctccctagaacatacgagtcctcttgaaatcatacaaaaataaaaaaggcaggatttctcctgcctttttgcatatgtaattcctcttcactatgtcaactcagcgcttttagcgagcataaaagcagagatactaaacaaaacaatcaataaagaagcggcatgtaacagtaaaaaaagaaacttttgaccgcctttaatgaagagcgaataaatcattcctaggattgttactaagattaaaagtgctgctgctattttaattactatagcaaagaaagctccggcaaatacaattgacggaataaaagatgctacaataatgatatacaaaatcagtgtagcaataaaagcggtttttgatacgtttgaagcccgtttaaacaaattcctcatataatctcctttctcattttaaaactgcatcttttactataatacatgtgcttagaggacacaattaacttttgtgaaaatccccataagttaagctttatcgccaatgatatcggttatatttttaaggtcttgtttgcttagtttatcaaattttgtggctgtttttttgtttgaattatttgttgataaatagccttgaggaatgctttgtagtctttacttcaaaatcaattcacactaaaattctctcttccggtagatagacagcgcaataaagtaagaagcaatatacattaccattccaaagagagtatataagataggaacatgcaaagaagaagcgatcggtaaacttgatgccgctaatatctcgactaaatagccaacagctccttgtaaaaacatgcttatgtagcgtttgaaaggtagcgagtttaatagcagcatgtgcaaagaatgccgtcataatcgcaaatgacaaatacagaaaagcatctggtataaacaattctatttattcacatccttgtgggttattatatcatattttccttaatttaggttaattgattttatggtgcagaatctgctatctcagtaaatatactctacaaagctgatttctttataggaacgtcaaagaataagtttctttttgtacatatcatcctacgtttaataaaacgacgcatagaaaatatacagagacacatataattctaaaaatttctacttttattagtaaaaaggatattattcctttttatggtataatcaaaaaatatcatttatagggagcgaattcgttggaaactaatacaaaacctcaagtaaacaccaactctattgtttctctaactctaggtatcgtatctattttcattccaatcatcgggtttattacaggaattattggaattatcttctacaaaaaagcatcaaatcaaatagctgctaccaatcaaagcggtaaaggactcgcgattgccgggctggtttgcagtatagtaggcgtgatttctcagctgttctttgtattagggattattacgtttatgtttggcggaacgacggtggactatgaataaaacaggtcaattaaaacatgtaggaaaatcgcggtttagatagaattattgaattttctatgtgaaagaataaaagcttgattttcgactctcggaagattaagctcttaaaattcaaacgttaactatgactcattgttactagacctatagcttttagtgtaacttgcaaaggagaataaaaaattaaatctattgttgaatctagaataaaagatatagtaattgttctacttactttactactagtaatctctgtgttgattaactgttctagctattttaatagtacggagatacaaactttgacctcaaaatgttatgataacggcggagaagtcatggtagaaatacataatccaattaccaatgactattcttttgaatgtaaataaatgagttagactgcacctaattactcaataagcttttttaaaagagggttaacgatttagccctcttttatacgttaaaatatagacgtatcaagttaataacaaaggtttgtttatgaaacttgtcatattaggcatctgcgtatttttctatgcagtactactggactatctaaaatataattatggtcttaaccttacaggaaaggtgctaatcctgtccgttttaactggaattacgtataaaattattgagaaaatatatgagaatcgagcagctacaccaaaggatgaggagtaacattaagtcagcgtactattttaattgtttctgcagtgtgcttactaaaggttctctaaatgagaatcttttttagtatctcttatgtatctgctatgaaaaaagattgccgatgaagataataaatcctgtcactagaattaatccagcactaattaccaccgttagaatacttcttagagccgatgcccaattgtttattccaaagaaccctataatgccgacgaaaaatagaatcattgctaaacaaaaatttatattaaataacgctgggtgattaaaagcgatgaaaaagaacacaacgcacagtaacgcacacataaatgaccaaaagttgataattcgtgccacttcaattaaacttcctttccctttaaactctacatatttaaaaccctcttaattcatttatttcaaatctatttttaaccgcttcaagaaaaaatcacaaacttcggtttgaataaactgcttcctcaaactgcacaataaatattctagttcaaattcctgataaaaaattttagtcacatacatttttaattcttctagcgtaggtggttctgacgcatatagtttatctaacgaaaggttaaattgagagaacagctgatcattttgatagcattcgaagatttctccaccttttattcggcagctaaacacacctagtatttttaagaatgcattgacttgattttcttcaaattcatgatcaatcgtgaacataaaaaaagggtgttcctctgcgttaatcatatgtttcatcagactcatttgatattttaatagctttacttcttttacgacgtccaacttcttcacatctttcttaaaaaaatcatcatactataatactatactctgtgaattttaccataatatagtagttacataaaccgttcatagtacttttatttatttgtaattaattggataacaaggtatattgttataaataggaaattactttataaactgaaagtgaggatacatatgggtttattaataattgctgctattatcactttatctgttatcttggactactttatttttgactatgatgataaacactggggctggttaaaaaaagcttctaaaccagttagaagaagtgttattggttgttacttgcttatgtcatttgttatttattttggtttgagtcttccgtatattaagccttttttataaatattaaatacaagctgagtcactaacagaaagacgcctatatccaaaggatataggcgtctttctgttagtatcacctctataatgccaatgagcttaataacagctgcattttctgttctgtttctttctcttggcaaggttgatgttagcgctaaaaaatttaaagtcagttataaaaatgaacatgcttttttatattccaatacgaaatatgcccaagctcttttcattcagctgcatattctactagtacaagtatcttttatgaaaggagaggttatcttgagcgaaagaaaacaagaaaaaagaaatgatgacaatcataatgattcgtttgctccctttatcagccccaaccctgttacctcatttaatccagtccagcgttatcctaaaattgataaaacagctttcataagtccattttgtagcgtaataggagatgtcagaattaaagataatgtatatgtagctcctaatgtaagcattcgtgccgatgaaggaactccattttatatcggttcaaacacaaacctgcaagacggagtgattttacatggtttagtgaacaaacgctttcctgttggcggtaaaggttattccatttttatcggaaacaaagtaagcgttgcccacggtgctcttattcatggtccttgttatataggaaataacacatttgttggctttaaatcgattgtttacaacgcaattgttggagaaggaacatttatcgcatataatgccgtcgtcacaaatggtgtacggattgcaccaaaccgatttgttccacccggagctaatatcgatacgcaggaaaaagcaaatgctcttcgccgagtcccagcagatggcgaagaatttgcacgagacgtacagcgtgtaaatcaagaatttcccgcttcttatcacttattatttggttcgcaccgctgttcttgtggaatgccctatggtcattaaaagtaatccgaactaatcctttgaaaacattgagctcaaaggatttttttgtttttcgagtaattaaccccctcactttaccactactacaaattgtttatcttcaaatgtaaacatttcccctaattcatagatgtacttctttttgtctaatttgtaatactttccgaaatagagcgtttttaagttaatactcgtatctagacttgaatctttttcttccgcttcatcgccgtccaagcaagaatataattcaatttgacaaccctctataaggtgttcttcaatatatgtaaaaagctctctcatggatttagggtgcacatcgcaagataattcgtagatatatggcaaggtgaatacatgctttatatcgccgtacccgccatttaagtaattgatactaataccgtacgcatcttcttctttttcatagattgtaatcagcttttctttctttggatttcgattaaaaggagaagcttcggataaaggcaccagcgtttcttttgtaccaaaatttcctgtaggcaattcataaggagaacctatatagtgatgtatcgtcatattcgtcacttcgctttctctttgcttataaaatactattattctatcactcttattaagattacatacaaatacaagaaaaatatgtataataaaaccaggaggtgacaacttgaagaaactactaccttttttatttttagccgctctttatttgtatgactcttcatacaatcatactgcttttttacataaaccggttgtttctgcgtttttatatatagctgctatttttgcctgtgccctgctgcttgtaaatgtaaaaaaagatagagctgtttaagcaaggagattactatgagctataaaatcgtattctttgacgtggacggaactcttactcatcacgaaaacgggactatttccgctaaaactcgagagattgtaaaaagcttaaaagataaaggaataaaagttgttgccgcaacaggcagacctttatctctctgtgaagaaattaaagaattaggcatagatacgctcattaccgcaaacggagcgtttactgtacataatgaagaagtcatttgtaagctgtccatggacaagcacgtcgcgcgcgaagtctttgaatatgcagcctcgcaaaatcacggtctttcattttatacaaaagagctcagcatgaacggaatcaaagatgataatattttaaaagccctgaaggaaacattatcgctcagtgattatcctcaaatgaatgagcgtatttatgacgaagatatttatttaatgtgtctatatggtgatgataaaacggctgagcagtatacgcagcgatttcctcatttaatgtttaaaagatggcacccttttgtcgtaagtgttctttaagaagaaattacaaaatcggtagctatcctgaaggtcttagactattttaacatcgatcaatccgaggctatcgcattcggagacggagaaaatgacatcgatatgatagaattagccggccttggaattgcgatggggaacggatctgataagttaaaaaacgccgcagattttgtcacgaagaaatcgggtgaagacgggattgagtttgcccttaaaaattttgaagtcctatagaaaagtggcacgcctagataacttatctaagcgtgcttttttctttccataaatgtttcaggatgtagctcctccgattgaatgacaatggccgtcataccggtttcacttcccgatgtatgccactctccttttttccacagtactgcttctccacgtttaatagatattcgtttttgattctctcctgttacccatccctcaccttcgactacgataaatagctgagagataggagcttgatgatgccctatcgttccttctccttctatatacatataaccgatcgtagctggttcatttgttcgtgccatttttacgtaagtggctaaatgcgactgatatttttctacttttttgccatgttctttgctgcatttatagattttcaatgtgcacctcttctttgttcattacgatttcttatttatttttactgcgtttaagatactcaggcggagacacagactcaacaaataaagcaccgtctagctggtcacgcggtacaaataaagttggcatagtaccactttctaaaaagatcgttttagtaaatatccatttgttgtctgattttttttcaagctgtgagaaatcagtaaataaggccggtgattgcacttgatgcatatagtcctctagactttttttaggcggcttctctattttatatggctgccctgtatccgtatgtatttcaccttcatacataaataagcctaagtaataagactgtttttttatttcattagagacaatcgctcctagaggttcaaagcctgtaaacgttttatattgtttgaaaatatgaaggttatgtgcccagataataatcttttcattagggtacagctcttgacaaatccattctaaattttccttcattcgtttttctcttagttttttatacatccggtgattatggtgaatatgattgataaaatacaaacggttttgcaggcatcgaataattattttaactttacatacaagctcttgattttcaagatgcaaaacgtattcttcaagtagataagcttctaaatctcctattactacgcttgctttttctttaaactctgcaaactcacgtagcatttctgctggaactttttttcttctcgatttatattgccctagctggtaataccatttatacacgcctgcttcaatgtattctatcttttctatcatgtcttcagacactacgggactcagctgctgaacgaatttcacgaaaagatcacgattagaagaaggattaatatctattcctattaaacttaaatctgattttttcattagctgaaacaaagatagattttcttttgttgcccataaagaataaacggcgttttttaaaaagtcttcatctgtaaactcttcttttaactcattagcgctgtagcattcagctaatccgctttcaaatgccagtacggtaaaattcatttctttatgtagaaattctattatttttgacttcatcatattatgttctcttatgttgtgaccattttcccctaaccacacaattctcttatcttttacgatatgacggagaaattcaaactcttgaggcgtacattcagccggttcgcttaaatgaattgagtttttagatagccactccacagagtttaaatacctctcttttccttttgaaaaaatccccatattctatcctccttcaccaagttacctattacttccattttactaaaatacagctaacacttcactatttatgtccaatagctgatcagcagcaaaaaaaccttatagatactcctataagatcttgtttttctaaagttctagatcaactcatcccgctgagctttctccaaacgctctttgactatttttttaaacgcgtgaggatcatctacgcgaatggcaacctgcttgtatttctttttgattcccataaaaagcgttgcttcgattggagattttagtgttagtaaaagatcgggatgcacagtttcaaaatcgcgtgcgataaattcaatcgtggtgctgggtattttttgctcgagaatgtgagcgtcttctactatctcagcaatgtctctaaatggtatctccatacgcttacctaaaccaaatgaaatgtatagatgatcatcatcgactcgcaaagggttaagccttaatgcttgaatgtctcctaaaaagaaaacaatgctataaatattaaggatcagtaaaacgattgaaagaatgatagacgtattatgcagcagccagtgaagccctaatgtttcaatgataatcgcatgaataatcataatttgaaacgtaataaaacttgagcgtttatacagagtaaacgtattcccttcattactgggctgcttcttccacgttccaaatgcatagtaaaacatcagcatttctgaacaaaggatgtgtagaaacgtttggttggggaacttttcgtttacagtccgcgaaaaagaaaataaaagcggtaaagagcttgatttgatccttctcaaaataggcggtacgtttttaactagcataaacagcagcgaaagttcaaataaaatgagtactccttctattccaacaccgagccacataaccgtctgaaaagaagccaagtattcacttggaatgataaaacgcgcagcaataaggcctgtagccattaacacaataaagtgctttagactgaacttacgctgccaggctagaaataagagcggagccacaagacttaagtctaaaatagaacctactactactccgttgagatcagcaggcagcgactgaagaccaaaagaagagtggtacaacacgtaatttgaacttatgactaacagcagtaaaaaaagagcaataaaagaaactgtttttttatgaagaaccaaacaacccacctcactttagttagtgaaacacgtaaattcctgttacttccattttaccagtggagttgatttaagtcactttgtagcgtgacattatgttataaaatcattttttttaccaattcttttatacaaataatttacaatgtaaaaagagtttgacatttatggaactgatgataaaataataaatgtaaaatattttttacatttattataaggaggagtaagaatggattgggttaaaattgtgtattcattcatcctgttagtttgcggacttttgatttttgttacatcatcttctcgaaaaggtgatgaaagaaagaagtttatcagcacgaaggctcaatcatacgcatttgtggtagttataggtatgctgattttagaagttatagagtcaatttatcggacttttcaaggaaaaaattcttatgacggcattggcatttcgccgctaatatttctaacgatgatttcagttgtatatttgataacgtttctcacgtacagaaaaaaatacggtgattaaatgaaagatcacaagtaagaaataaagaagttcagctcatctttcctgatgaaacgataaatatagccttactttataattggcttttaatacagcctctagatgacatccgacagtagatgagcttgttataagtgttttattaacaaggaataactagacctcctactgaggtttttttgtgcatgcctaaacttttgttttgatattaaactgaaaataaaacatctcccgtaactaaagtcaggagatgatatcataaacgttgagttcattagaatttgcttactctctattccgcttctcaagtaattcaacaattctatctttttgtttaacaatcgttcttagctgtgcttctagtgaacataaagtgataaaaacggctataaatcctacagtagctaaaaatataaaggcttctccccttttttaaacaatcaaccatatacgccctacatctcaaaaaagctatgcctttccactttgcccactctaagcgaaaacgtttgataccattctttttttcctttgtgctgcgctgcgcggtgggctgagttttctttccacattcttattgattctaaggaatcccagtatgaaacggtaatacctaaatcttgatctctagcactttctattcctaaaaagcctttttgtttagatgcaagctccaccattttatctgccattatcccgtaacccttctctccttctgttctttcagaagcgaaaatgacagcataataaggaggatcaggggttttaacaattccaggcatcttaatttcctcctttaaaaatcaaattacagtaaaaaagtataagtgcataattaatttttctattacctttatcttcttttagtactatttttataaattccattattggattatttttcaactttttaatggaggtatacggggtataaattttactgtacagatgcagtccccctaaaggaacaggtacatttctttcttacttaccctttttggaactctcttttttgagggttctttttttacgcgtttacttctttcccatcggaagaacaatcttaaacaatgatcctcccgtctccttattatcggccgtgatgcttcctccgtggtttttcacaatggaatgagcaatataaagacctagccccaaattcccgtgcccgcttgttctcgacgcatcttctctgtaaaactttttaaacagctgttctttgttggatagtgtaaacccaggacccgtatcatgtatttcaaagattacttcgctatgatgaatgacggtattccaagctatctcccctcgttcaggcgtgtaccgaatacagtttgtgatgacattatctaatacttgagaaatgcgctgaggatctccgtaaaattgatttggtccgtctgcttcactaattgaagataaaaaggtaatctcttttttttgacataaaagctgaaactcgtccgctttctcatgaacaaatgtgtagatatcaataggttcccgttttacggtaaagcccgggttttctatgacagatacttcttgcagctgatttaatagttgaatcgaacgctgtgtatttgtgtagatcgtatgtaaatatcgattaagcctctccgcgtcctttttgcttccttctattaaaatttcggtgtgaccgtgaatgattgtaagaggcgttcgtaaatcatgcgcaatcgcagccgtcatatccttacggtcttcttctagctgccactgtttagctagcgattgctttaattcttttcgcatttcttcaaaggcatgcagcagctgacttaattctttggcgtcttgagtcacggacagcgaaaaatccaaattattatgttgaatattctttgcggctgtcatcagctcgttaaaaggtcgttcaatttttttgctaaatcgtcttccaaataaataagcaaacaaataaaaataaagaaacggactggctagagataaaaacgttacaagcgcaacgatccatttaatatttgggttagccgaagccatgtttaattgatatcttaacgcaatggccccgtttacttcgtcttttgaatcaaaaagcggatagacttttataatatatttacctgaatggatatttgtattaacctgagaataaaaatcgcgtttgctcttggtatatgaagtggacatggagccatacacgatttgtccttctttattcataatttgataatccatgccttctagcggaataaccgattctacttggtttttagcatctttagaaaggagcgcatcttcttttttcttaacgaactgaagaatatcgggaatttgtttttcataataatttgctggattcagtgctccgggcataaaaaaccagttcactgagatgacaattccccacgttaaaagcgtagcaagcagactatacagcaaaatcacatgaaaagataaaacaaactgcgcttttaacgttgcccggttcatccatttttttattttacccatttgtagccaatgccccaaacggtcgagatataaggtgtttcgtcacattttaatagttttgctctaatttttttcacgtgttctgtaatcgtagatgaatctccttccgcgtcgtagccccaaactttttcatacagctgctcgcgtgtaaacacctgacctggatgaagagcgagaaaatgaatgatctcaaattctctcgaagtaaacggaattacttcattgttatgtaaaatttgatagccatttaaatcaatggttaactctccaaaatgaagcctgctataggaattgctgctaattctctgctcacggcgcagatgggcataaatacgggcttttagttctttcatgctaaaaggtttaactaaataatcatctccaccgaccaatagtcctcttactctgtcctgctccgtttgctttgcgcttaaaaagatgatggggcatgatatgctttttcggattagttcacaaagtgcaaagccatccatgcctggcatcatcacatccagcacaattaaatctggatttatttttaacttttttaacgcttcttgcccttcgtaggcgaacagcacctcatacccttcatcttgcagcgcatctttcataaatgaaataatgtctttttcatcatccactagtaaaattgtttgattcatctccagctcaccctacccattctttctttttccatacgaataggtttattataaggctaatgagtaaaattggaaataataggttcactaaaaattcagagtttggcctgcttaattcatgaaaaacagaatcggttacggagaaaaagaagcttagtttatctgacacatacacacttccaattaaagcaccaatagttgcgacgtaagataaaatggaattaggcataagaacactcaggatactcccgatactaataaccgctataaagatgcaaaaacaaatgccgtaaaatttcagcgaatatagtaacgctccaacagtccctaaagtctgtcctcctaaaaacgttgtttcatttacatgaggcataaccattcttccaaggcatgtacccactaaccacgtaatacaaagaataataaaaactagtaaacattgaaccgcccactttacaaaaaatagcttcacacgatggtgcggccgaattagtaccatgcgcagcgctcccgacgtgtactcaccgttgaagctatctgccacaaacataggaatgacaataaacgtaatcgcaaaggataggtctcgaagaagcagcggtgctgaatttaaagaatcaattttcacgtcgtggtctgcatcaaaaaacgaaatgcctcccctttgaaaaaagaaccaaataaaagcaagtaaccctgcgtacacggctaatacagccgctgttttctttcgtttaaacgttcgctctaattcactgataaaaagtcctgtcatcatgtcttttctccttttatagaaatgattctttttttcgaatagctacatacgttaaaccgctaaaaaacagcacataaaaacctaacacaccgaaattccagcctacaaactgcggtttttctgccatcatgactgtgatcccctgccattgaatcatcggtacggaagtaaaaaacagctgtccaaaaagctcttcactcatccactgcttaaaccctgttaataaagtcgggtacgaaaacgagatcagtataaaagcaacaccgattccaacagccgtagtggtcgttttgctgataacagagataaaaaacagcacacagcatatcgcaatagtcgttaaataggcatatccatagaatgaaagattatatactagcgcttcttttatgttgaaagcatgactgtgataaaacacaaagtaggtttgcggatgttcaaacatcagaaagcctatcacatagctcatacaaaaatacgtaataaaaaacagtaaattaaacagcagaatcactgcggcttttgctaggatgatttctttaaacgaatatgatcgtatcatgaccattcgcagctgtcctgaccggtactcgccggtaacaacgagcgtaataaaaactaagaacatggcattaaaaacggtaaataacatttcagctaagctcagtacaggaaagtttcccgcaaacgtatactgtggtaaatcgactgtgagtgctccgttttctttttggagataagatgaagcagctaacagcaccaccggcactaatagaaaggtcagccacgccacttttcttttccaaagtctttcccactccgctactaacagctccttcattgtgacaccagctctacaaacgcatcttccagatttttaccggatgctaactggtctagagcgccggcccatattagctctccttctctcatcacaacgatttgatcacatactcgctgtaattcatccagcaaatgactagaaatcaaaatcgttttgttatagtcgcgttttaacgtaaaaagcagctcgcgcagttcacgtacgcccattggatctaagccgttggctggctcatctagtatcaacaggtccgggtcacctaagagcgcttgggcaattccgagcctctgcttcattccaagagaatacgttcgaactttatcgttttctctgccggttaatcccacgatatcaagcacttcttttactctttgctgcctttgttgttttgtgtgaaatgaatgcaggcgagctaaatttgtcaggttttcttttcctgtcatataaggaaaaaagatgggcgattctacaattgcgccaacgctttgcaacgcttcttttctttgtgaaaaaatatgtttgtcattaataaaaacttctcctgcggttggtttaattaaccccgtcaataaacgaattaaggtcgttttaccagctccgtttggtcctaacagtccacatatttccccttcattaattcgaaacgatacttcttttactaagtgacggcgtcttacctttttcgaaacgctttttacatctaaaatgatatttttcatcttaaatcccccctacacgtagtataggagggatttataaagaatttataaagtttataaaaattgttgtacaggttttttaactacaatataggataccactgcaaataaaagcaaaaacatggataaaaacaaatagcccgcaccttcaaagcctcttacttctccataaccaatataaaaaagtacagccgcagtaataacggttagaattgaaggagccattctaacgactttgttccatttcatttttctgaatagccaagttacaaggattacaagtacacctggcaccagtgcaatcagtaaaggaccgcctatcatcatcgtctatcaacctttcaagatatctgttattgaggagcatgtatagagaaatatttaagtgctgtgtttagtttagttttttattccctttcccgtaaatcacaactgtgtaagaatcacctttcactttattcttcatttcttttgtttcaagaaattcatcgataattcctttaagtttatcggcaaatttcttattatcttcggaaacgtttaatgaagtgtagataaataattgtggttcgggatgaacagaatagcctaccatcttgacatgatatttcttttttcctaataagtcttcgcctatatccgtaacaatagttccccatcgattatcttgatcacgtttcttaagatttattttctttatttttattaaagcattctctgccttattttcagccagaacagcatgaatgagggcttttatttcttctactctcttttctgtattaggaatttccagctctactcttggcggagaattaaaactaacgttagctattaaaaaatcataatgatgcttctctaattctgtagaaatatcagtttgaatcttttcaatttttttctcttgtgcattcggttccgtatagacatacggctccattctttcaattttaaacgtataggcatcatattgccttttggacaaaatgttggttgcaatatcagttatgtctcctcgtaccttattaaaatacttctccgacccttctactgatacaactaattcttttttccctccataataggtctgccccacgctagctgttttatatccctttttttcaagctcttgatataatacatcggctataggcttttgcttaaaaagctgtcctacgtaaggaattttagcagccacttgggccattgctggagaaacaaaagctgaactaatgaatgcaccgctcaaaagaaagagggtaaccccacaatatacaatatttcttaccagatgattttgttttatagaaaataaatttcttttagactttggtggtgaagattctaattgatcaattgtttctaaaagcctttgtttatgtttttgcttccttgttggtttccaaatcaactcctcgttcaatttttctagcgaattgtcatctatataaaaattaaacggtttcttcatatacgtatccatcctttactaactgctttcttaaagcaggaattgccctgaactgcgctgattttactttactttcagaccagcctaaaatagtcgctgtatcttcaaccgaaaaaccttgaactttgcgcagtaaaataactttacgatgtgaatctttgagctttcctaacgcttgatacagttctagagaactttctttaagctcaatcatttcttgaggtaaacgagcatgatcctttttcgaaagaagaaagtcttttaaaagactagtaggcttttgttttcgaaaataatcaatcgttacattatgggcaatacgaaataaccacgtcttttcactagcgttttgctgaaataaatcataggaaagataagcttttacaaatgtttcatgggtcaaatcttcagcttgctgataatcttttacgagcatcaaaataaattttaataaggcgttactatgttcgtcataccaacgctcaatctcttcttttttcgtattttccaatgttctgaccatccttttaactaatattcgttacttagacgtaatctataataaaaagttgtggtttttatttacaaaaataaaaaagctctcctaattaagaaagcttttactatcacaatctatgaaatttttagttaaccaaaggcttagggctcggaaatcccattcgcaattgctaataaaaacattaagccggaaagcaacacaataaagatgctgtttgcgataatgctaaaccacacaacgctcggcttcttcgttcggactcctaaaactaatgccacaataaaaccaaggtctattgcaaaaaacagccacagtgcaatagtcatatctccgcttctgtttggaaaaattgaatttgatggaaatatccaatctgcaaaaaacactacaaacgcagccaccaacaaaataaccgttaataaaattggcttattttcttttgaaacacccatttcaaatatcctcctaactaaagaaaataataccatataatatttaattgaaatatacaaattacaaagtctcaacatcagaaagaaaaaaaggacatagatttttattaacgggttcttttctggggggtaaaacttaatttcataatgcattctagtatgaattgacacatgaattcacgttttttatttgcttgatattacttctatatttgctattcccccttaaattcaagcagaaattcgcataaaaattctcgaatatggaaataattatttgaatttaaccgtgaattatttagtgagttctaaggatattatttatttcaagtagggtctgatatctttcattattgattcactttattaaactgtttggaagttttgttgaacaagttgtaaatttaaccttctaaagtaagagcatttctttgtgatgagaaatgctttttattttgcttaaaattaaaagcatatttcaataataacaataatagtataacaaaaaacgataatattttattgtaaaacgataaatcatatgttaaattcttattatcattaaataagtgaggtgtttttatgaatgttaaacgaggttctaccactttcttaaaggtaataatttttctgattggaattgcagtgcttgccgcatgtatatttttgttgcctgaagcagccagaagagatgctatagagcgtcctggtgattattcgctatatccacttttggtatgtacatatggaatatgtatcacgttttctgtggcgttgtatcaaatttttaaacttttaacctatatcgaaaagaataatgctttctctgagttatctcttcagtctttgaagataataaaaaaatgcacttttactgtcattttctttattttgttagcaatagtttatttaagggtgcatgctcaattcacaggtgatgatgcagcaggtccaatatctctaggtctaatgggcatcttggcaacaagtatcatcgcagccattgtggacgtgtttcaaaaacctataaagaatgtcatggattcacagccaaaaaacaattaacatttagaaatataggagaggtgttttttatgaagatagcaaccacattatttttgaagatagcagttattctcattggaattccggttctcgctttgtgcatatttctggttcctgaactggcagatgcggtagcggatttcttaggtattcattccatagaatatatcattttcatccttttatatggaggaacattacctttttacttcgccctttaccaagcttttaaactgttaagttatattgacaagaacattgctttctccgaattgtctgttcgaattttaatgagcatcaaatactgcgccatttccatctgtagtttgcatgttttaggtttacccgtctattatctcgtggcagataaagacgatgccccaggtctcatatttgttggaatggtcattccttttgcttcgttggttatcgcagtttttgctgctgttctccaaaggcttttgcaagaagcgattaacataaaatcagaaaatgatttaacggtctgaggtggaggatatggcaattattattaatattgatgtgatgttagcaaaacgaaaaatgagcgtaaccgagctttcagagagggttggaattactatggcgaatctttccatcctgaaaaatgggaaagcaaaagcggttcgtttttcaacattagaagcaatatgtaagactttggattgtcagccaggcgatattttggagtacaaaagcgacgaagacaatcaataataaaagaccataaatttcttcaatcatgaggattaggtattgaaattaaaatgaaggggcagcttaattgctgtcccttctctgcttttattgattttttttaattagagaactcgattgagaattatattgatatgggtgacaatcttagacatagctcattccaaatattcttccgctaaatgtgggtttaaatagcgagccataccggttttcattttacgaaaccctgcttttttataaaactcttcatttcctgctgtggaaacaagatgaacgcaggaaatatcgtcaagctgagcaagcaggttctctataatttgctgtccaattcctttgttttgatactccttatcaatcacaacatcataaatcgcagcattaaacacaccgtcggaaagagctctgcccaaccctgttattttattttcatcataagcaatcgctactacgttgcttgcttgaaatatttttttgattttttcttcatcatggttcttccacccgacagagcggtaaatttctttcatcctcgaccactcaacgttttctatagaatgtgaaaaggaaattttcatagaatctactccttttatttttatataaactatttctgttttcaaaaacaaaagtccttggtgatcattcatttatctttcaaatcataacgagtattaagggtataaaaacatatattcaatatataaatgtagacaaaaataaaagttcaaatcatatacgatttgaacctaaaataaatactcgatttatagactccctaaaaaatgaataaatttcttaagactttgtgagcgctgcttccctttctttactacaaaatcaatatgaacgtcttctggaagctcttgatattgaatgctttttatatcaccacgagaatttactacgctagccgggactacacttatacctagtccatcgcggacgccttgtaaaatagcttctaatgaatcaaactccatgatgctggctttatgtatatgatgttcttttgaaaacgctaatagtctgtttctatagatgcagttcgcatcactattgatgagcagcgttggttggtctttttcttctctagcttcatatagagatgagataagcaccattttttctgcatagcgataaactctttcaaactgagcctcgttataggtaccgctaagaaaaagtccatcaatttccccgtacgaaagcatttccggtaaggcgtgtttcctatctgtttttattttaacctcaatatcccgatgttctttcaaaaaagacgagaacaaaaaaggaactttagtagcagaaactgtctgagacgcaccaatgattaaagactttctaaacttattcggattaacttctgctttagcttcctccattaaacgtaaaatacgctgggcgtagtcaaacaaagcttccccttcgtttgttaacgtaactcctcgattcgtgcgtatcaataatttggtgtctaattcttcctctagatttttaatccgctggctgatatgcggctgcacgtatcctaatacttccgcagctcttgatagtgactttgattctgccacacatttgaacattcgtaagtcttggctttccaattttaattcctccgctgatatcattttaaatgatacctctcttagtattacctattatatcctttttctcttcgaagatataataaaagatgttaagagaaaggaaggtttatagaaatgatcgattttaaaaataaagtatttattattacgggcggcggcactggtgtaggcaaagctacggctttaaagctagctgacatgggcgcaaaacttgtgataaactacaacaactcagaaaaagaagctaaaaaagttgtgaaagaaatctcagaaaaaggaagtatggcttttgcttttcgagcgaatgtagccaacgagcacgaagtgaatgaaatgattcatcaaacgattacacaattcgaacggttagatggattagtgaataatgctagtattacagctcaaatcccgatgaatgacttagagtctgcaacggatgacgtatgggactctttatatgatgtaaacgtaaaaggcatgtttcactgtgtaaaagcagccgttccacatatgaaaaagcaaaagtcaggagcgattgttaatgtaggaagtgtcgctggtacaactggaatcggctcgtctattccctatgcagcaacaaaagcagcaattcatacgatgacaaaatcgttagcgattgcactcgcaccccatattcgagtaaactgcatctctcctggtgcagtcgacacaaggtggtgggctggcaacgaagataaaatgtatcagcttgcaggcaatctacctcttcagcgcatttcttctcctgaagatatcgcagatgccatcttgtttcagttaaagcaagagtccgtgacgggccaagtatttacgattgataacgggcaaactctttaagcatatgcgaatattcctaaaaaacaaaccccactactagcaagaaatagtagcggggtcctaacaaggctactgattttatcattctttccccagtgaaaacccttcaaacagccggcctccatgtggttctaacactttatccaccagttgaattactttatctttattccctgttttataaaaggtatcaaatgcctctacaaactctttactaaagcgttcattatagagattcaaagacctgacaatccatttagaatccccgatccaatgaccgtttgttcttaacacaaattcgtgggttatgtaagcgagcgtgttggcaataaaaagtgattcacctgtatctaaagaaccgattaaatcatctaaggcatcgcttataaaatatctttttaatctaatcgtctcttccggccatttttccgggcctttttctagtaattgtgcagcttctttttttatagactgcaccactcctttatccactaaaataatgccctcggaaatcattctcggcagtgacggtctagccctcttacagtcgcttttaaaaaaggcttggtatgaagtcagattatgagcaaaaacttcaattgcccatccaaactcaatgagagactctctaaaagaagaagtaaaattatcatcaaaaataacaagatcaaggtcggacgtgtgtgtagcttctcctctcactacgcttccagtgagtaatgcgccttgacagttagggtaatgtttaaaaataaattgtttagctgcttgcagcggttctaagctttttagctctttcatcatattcctccagaaaatgatatatattgtttttctggttagaacgtggaaattcctttaacaatcagttcttaatttaaccttgctgaacatgtctaccatagttacttttagttaccatgatttaaatgactcttttatgcaactcccccttgccttaaagtcgactttaacgtttaagctagttttatagtttttaaactaaaaaaaaggggaaacactatgctaattaaaagaatgacggtgcagctttccggtgaacttctagcgagacatacagctttgtttgtacgccaagcatgttcgtttcaaagtgatatttttcttgcgaaagacggaaaatgtgtaagtggaaaaagcatcatgaaggtaatggctttagctgttaagaaaggagatgaaataacactgctaacaaatggagtggatgaacacgccgccgcttgcacccttgaagaatttcttttaactaaacaaagatagaaaactgccatgctattccttcctttccttttttcataaagtcatagaaagaaatttttttcaaaaaggtcttgctttaaagtcgactttaacgtttaagctagtattgtagtttttaaatacatcaagcgtagtcagtgaatgcaagggcattagcaactggttatgtttaatttgaaaggattgtgtttttacttatgtgtaataatcatcaacatacaacaacatcacgtgttttaagtgcgccgcacgcaaaggcaaaattcgagaacacgacaattgaacgcagagaactgcgagcagacgacgttttaattgatattaagtttagcggtatctgtcactctgatattcatagtgcatttgatgagtggggcggcggaatgttcccgatggttcctggtcatgaaatcgcaggagtagttgaagcggttggagaaaacgtaacaaaatacaaggttggcgatcgcgttggcgttggatgtttcgttgactcttgcggagagtgcgagtactgtgtaaacggtgatgagcaatactgtacaaaaggcgttgttcaaacgtataattcattggattatgacggaaaccgtacatacgggggctacagccaaaaaatcgtcgtaaaagaaggattcgttgttcgtattcctgataagttaagtatggatgcagcaagtcctcttctatgtgcagggattacaacattttctccgttaaagcactggaatgctggtcctggcaaaaaagtggcgatcgtgggaatgggcggccttggacatgtagcgattcaatttgcacatgcaatgggtgctgaagtgacggtattgagccgttctaacaataaaaaagaagaagctctaagctttggcgcagatcattattttgcaacaagtgatgagacaacatttactgaattagcgggtcgctttgatcttatcttaaacacggtatcggctaatctgaacgtggatcaatacttatcattacttcgcgtagatggaacgcttgttaacgtgggcgcaccggctaacccagatcagtacagcgtattctcacttatcacgggacgtcgcagcattgctggttcacttgtaggcggcattcgtgaaacacaagaaatgcttgattttgcggctgaacacggcgttgcccctatgattgaagttatcgatgcaaatcaagtagatgaagcgtacgaacgcgttcttcgcagcgacgttcgctatcgatttgttattgatatttctacactgtaagtttagagagaaacgggcagctaatactattagctgcccgttttttggttctttataaaataaaaaaacaaacgataaattaggctttagatgaaagttcttcctgatacttttgttctaatttatcatagtaatcaattttcgtttccacttttctaaaagccgcgtccagctctctttgtttttccatcattttctctctatgcttttcaaatatccgcttgcgcaaaccgattgtatcatcgccttcttgtgttaattcaacaattttacgtaattctaaaagggcaatatccgtttttcgtaagcaaataataaattctaaccactcgatatcagactcgctaaaaatacgatttccgttttcatctctttttataaaaggtaaaagcccctgctgttcgtagtatcgaagcgtatgcgtaggcagccctaccttcgccgcagcctctttaatatgatattccattccactataccctccatcgccattctcagtacggcgtttgctttatgtatctcagcttcccttttcacgggtgctctcagctcatcttctaggtttctactatacaatatatataatagattcggctattttctttgctataaggtaactgtataaatagtatcataaacattaaagtaaacgttaaggcaacttataaagagctgccgtgaagtcagcagctcttttcatttttatataaaatacgattaatctgcggccagcactttacttagttcatttaataaataatcaagggtttgactgattcgaactgtattacggcttgtaaaaccttctgtaagtcctaacataaccatatgctctcttactgtttcgatttctgtcattaagacttgcatgacaactcctttataccacttcacagctcatcacccctttttactgtgcatatatctcatatgcggtaatcttaaacctatcatacaggtttttgggtgtgaatagcgagttttagagcttcaacagttttattttttataaagtcaatatactaatatacttattgaaatagaaagtatcactccactttctgttagaagttaagaaaaggcctccatttaggaggccttttcttatttcttataaagcagtctaatacaaagccttagcctctaaaatattctctataataggaacctttctcacactctatctcatagcgcagcctcgtttgctttctgtaaagctcttcggacagctcattaaattcaccttctgtgatagatccatgaattaaattgttgaataaattattaagatgttcagttaattcttgaagttttttttctttcaatgaacgtcaccctttaaaataattttcatctcctaaaattatatcaaataaaacgttttcatacgatatattttttactgaattatcgtattaaagtgatgaaagtattttttaaccaccgccaaacaatcaaagagctcagataaatcattaatcacatgatttcagcaaaaaataagtggataaagaccacagacaaaaaggcaaatggtatcaaccgttttgacaaaagcataggatgaaaagaaaaattaaacgagaaaaggagaatgagtatgcactatacaccttattatcatcagtggcagactccagtgtattacggctggcagccatatggttattatgtgccgagtcactatcacaccagcgaacagtttcagcaaagaaacggtaaattaaaggactacggaccaaggccgtttgttattaacattaatgaagcgtcaaagcaaaacaatacgtaccgcactgctttatggacgggaacacatttacaagtgacgctaatgagtcttaagcccggtgaagatatcggcttagaaatccaccctaacgttgatcaatttctgcgcattgaacaagggcaaggcgttgttcaaatgggcaagagtaaaaacaatctaacctttaaacgaaaagtctacgatgatgatgcgatatttatccctgccggaacgtggcatgatgtcaccaatacgggtaccactccgctaaagctttactccatatacgctcccccaaaccacccatttggtacggttcatgtgacaaaagcaaacgctctggctgaagaacattaaagataagcagagcgttatgcaggagtggaacgcttgttcaggatcaatactaagtgaatagatggttgttgactaaaaaagctcgctagaaaatcggtgtatgaccttttctagcgggctttttttaaacttgctatacataaaggattttgtagccaaggaaagaattatagaataaactaatctttttaaaccgcttaaaataactgaaaggcaaacagacaatgaaatttttttataaaattcccaaatcaaacgtaaatccttctcttaaactagcaagaaaaattatatatatatctgtagaagcagtcattatgaccatgcttgtgattaaatcttttactgtggcctatgaaaacgacataaatttaattctcaggcagctaaatgaactaaaagcttcgattggcggatttggcataaacgaatcactattttggtttatgataaagtgcagtatttgtaccatcgctacatttgatatgtgcttatactttcgaaaaaagctaaaaaaaaacaaaagagtcttgtgattcataggctaaagtttttagataaataaatccacagtcaccatactaatgaaaaaaaccgaacgagttggattcacaatcaagaatcaaactcgttcggaccttccttcacctaaaacacttttgcccctgcctcatgtttaatagaaaaataataaaagtagaggcatattacacctctactttctgtttagaaatctacatcgatatcttcttgaatggttccggtcactttttcacttttaattaattgaccttctttaaatgtttcttcttcctcatttttaacgcgtttcagctgtttataggaaggagctgacgcagagccaagctcttttttaagcaaatgaatttcgcctaacagctcggttcttaatgaatgaattaacgattgaaaatcttcttcccggctgtctttctgcccgttttgttccacaagcttcgctacataatcctgaagttcctttgcctgcgaggcctcatactcctcacgatttgcagcaagacgtgaattcatttctttttttaataagtcaatttcgaccaacagctcttttcgaagtgaatgaactaacgtctccacttcattttctttgctcattttttgcaagtcttgctgtatgagtcttactacatagtcctgcagctcgtttgcctgctgtttttctttcagaaatgaagacacttctgacggaatgtcagcagtttcgattgtaaaatttgcacgttcatctctattacttacggtctttccccttgctcctatcatatctgctgatagattgccagctgtcagaaacgcatttgatagtaagtaaaatggtgcagccatttgggagcttagctgaccgtaccaatcatctattgcttccttaaggcgagtgttttgatgactcatatctgctccccctttttaaacgtgaactgcgtttgtttcatgtctgcttaaaatttcaagaccgtataaatttaatttgcgcgtctccggcaagaaaagatgattttcttctctgatttcttccccgtacatgttatcaatctgctctgcaataaactgttgaaggataggagccaatcctccaatataaatatatttatagactttatcttttggcgatggaaatagattttcaactttcgttaataaaatttgcgtatattctctaagcgaagcgtgaataggctccgtgagatctacttttttcccgctattgccgtctctttgctccatttttgctttatggatattggcaataataaactcttctaatgaacgaacatcatcaaaatactcaagcagtttttcatttcttagcttttcaatatgcttcaaatatgaaatgtccgtaagacacttcaacgaatttctgcttttaggtgcttgaaggcctgcaggaagcagcgcaaggtcaaccgtgcctccgcccaaatcgacaattaatgtttcaaaatttttgaatgcatttgcttcttctctatcctgtaattcaaaatcttttttgatcgcccagcgagcaacttcgctttcaatacggcatttgctcgtttcaatgttcaccgtgagtgttttttctaatccaggagtcaagacggtaaccgtgtgctctccttgaaaacgttcggccatcttctgctgcatttcactgaatttatttgttttcttaagcagccaaatcggaagcatagtcgagaaataattaatcgtcacatgattattctctttgtcttttcctttaagtatgttgtaataagcaactgaagctaaaaacatcacataaggaatatcagattcagttttattatgtaacttattaatatggatattgcctagcacgtgtttctctgctgcgtctcctactagataatacttttctactccttcgattgttgtagaaatcagtaaattttgaagaagtaattccggttcatttacacttgaaggaaaatgaccctctgcctgatcttttgtgatttctactacgtttgtaggaatttcatagtaataaccatccactagcgtttgaaaaattgagttaccaaaatcaacgttttgacgtttgatatccatccttgtttctcccctttatcttttcgtgacaacactaataagtatatattttcctcatttgtttgtctaagtatttaaataatttatgttattctaaattcacaattaattaattttagacggctaatgtaattgaaaagcacttggaatgcttctttttaccagtacccatttttacaaggaatgtaacatgtgacgctgtgactttcccttatttttttgcaatatcaaccattcaatcactagctagaagcagccacatacatgaaacctacgttcatcctaacaccaaaaaaacccgaaccatcaatcagattaatagttcggatttaacatcaactaaaatatttttcccagcctctgggcttttttatttattaataacgccatttgtctttttttctttgcgaattttctggcagtttactaaagcctatttcttcaagacctttttctaacgtcgctcttgttttaattgttccaaaatcgacgcctaaatccacaacggtttgcgcaatttccggacgtattccggtaatcatcgttttagtgccgataagctgtaaggcttttacaatttgaaaaatattgtccgctaccatcgtatcgacgataagaacacctgaaatatcaaatattaaataactcagctgcagctgagcgcttttttctaaagccgtttccataataagctgcgaacgatgcgtatcaatttgtccaacgattggcatcacagcgattccttcagaaagaggaacgatgggaactgataattcttctagcgctgcataagcgcgttttatggtgtccgtattatgttcttcgtagatttcgacaaatatatgattaagctcatcaagcattggatcaatttttttacttacatcaagcatcgtaataggagcaaactgcttctgctgcagctcttctgtaaaaacaccccatatcactgttcgaaacagcgcaagtgattttaacgtttgactcaaagaaagtccgttttccacagccacttttcctatatctgtaccccactgaacgattttctttaaaacgaccgagcgctcctcgaataatgactcgcctaaatactcaatgagttctgctctccattttaaaacttcgctttcttcgtggtaaaccagcttccgcttatattcagagtccatcagatcagaaaattgtatcgctaattcctgtttattatcgataattttcttccctatatataacaactcatccctcatttttttctttatctcctttagttagcagaattaacgattacattttataacaatagttatatcacatacaatataaaaatataaccgaaataaaaaaattgttaggccctccctatttacttttacccctattcttctaatcgatatacctaccataaaatgattgaaatttcagcgtttgggtaaaaaactactatgaatttatttctatacttataaggaggctttttcaatgaacaaacataaaggaaccgttaaatctttcaacgaatcaaaaggatctggatttattacacccgaagacggatcaaaagaagtgttcgttcactccaatgcgatcgaccgtgaggaatataaaaacctggcagaaggacaaaaagtagagtttgaaatccaagaaggagctaaaggacccagcgctataaaagtacacccagttgactgatagagtgacatttacatacaggttatgggtagactgtcgaatcaaatacttttcgaacccaaaaacacctcttcgacttttgttcgaaagaggtgtttttttatatgatgcaactaattctacattcaaaattagttactattagctattttaaaaaacagttctaaagttgtcggacaagtatccaaacatttcttctatgagtgaatacagtatagagtactgcaaagaaagggtgattattataaaaaagtattatttcaattacaatgataaagatgacaaatattatgtagaaaaatcttatccttacaagaagaaatctcgcaaggcttcccttaacaataagaaagagcagcttcaagaagatgcccctgaggaagcacgcggctgggcttatggacgtgaagaagatagctctgaagaatcacaagtttggatttatgaacgcgaagaagatttctatgaggaatcacatgattgggcttctaaatataaagaagataaaggaaaaaaaggaagcacgcgggagtcagcatttagagcgctcaatttaacgatgcctcaaaatgttcctgcaaatacgtttgtaaaagcagttttcccaactgaacaatttgatttagcaaatgaatataacccgattacttctaccttccgccccaaaaaagatggcgtatattccctgattgctacaattggattctctcctaacgaccaaatgctagattatagaactcgtatagaaatacgtgtaaatgggacaaccgctatcgctatcgacaacgatttctttggcgggaacacaccgtttgttaatgcggtatccgtgtctactatttacaatttagaagctggagatcgcgttgaagtttttgttcaaagcagcatagctggcacaattgtcacatccgaagatggctcacattttgaagcagcgagatttccttctccaacaaataactaacactagcttttagccaaaagcatcaatcccctctttttagatcgcttcatttttctaaaggaggggatttatataaacattagtggtctaaaggtccgcagaaactttttaagcgttcgtatgtacataattctttagtagatttatagcattaatccaatgtataaaatcatgtacttctatgtagtctgctgcctcactcacgcttgcttcgctaacttttccgttacgctgccaagctcttcaactaacccacttaaaaattccgccgtctggccaatgatctgcagcgattgcagctgacgcacggaagcagaagaaatgcctctgctgcttgcagccgattgattagcaaaagcagtcatatcgctgacggcatggagcacctgcgtagatccggctgctatttgctgagcggaagcagccgtttgctgaatttgctcgtgaacgtaggcagatgcgtcggcgattcgattaaaaacatcttccgcttcgttggctagtaaaataccgtttttcacatcggctgttcctgattgaatgaatgctacggcttgagacgtttcttgctgaatatgctgaatgagccttgctacttgttcggctgactgattggattgttcagcaagtttgcgaacttccgctgctacgaccgcaaaacctttaccatgttcgcctgcgcgcactgcttcaattgcagcatttagcgccagtagatttgtttgtgcggcaatgcctgaaatcacactcataatatcgttgatttccgcagaacgttcttttaactgatgaataacgctagctgcatgctaaacagaaatgtacaaacagtagttcttttgtatcattacctaccctccttcacaagaagggtaaacatggtgaacaaaattaaaagagattgaggcataactaaatccatccaatctaaaaacgaacaaatgggataaagctgctagtatgaatcacttgttccaacgctgttaatttttttgctggcggccgataagccttgccctccattcagcacttagaagcccctgcatatatgaaacctaccttcatcaaaacaataaaaaaatccgaacgcgtttgattctctatcaagaatcaaacgcgttcggatcttccttcaactaagctgcttttattctagcttcttttttaaactacttaattccgtaatattcttcaagcgtaatgcctttacttttaatcgcctgcgccactggtttgcctacatatcgcaaatgccacggttcatatttatagcccgttaccgcatcttttccttttggataacgaataataaatccgtattctgctgcgtgggaatcgagccaagttgcttctttagttccgccaaagcagtcttgagcagcacatgtgccgtctccttttgttacatcaattccaagacccgtttcatgttcactcgtgcctggcaatgcgctataagttgccgctttatcataaccgtctctttgaacatacgaactaaaaagcgcgctttgcgttgcatgtgaacggtaagctgatacgccaagaagcgtaatgccttgttttttcgcacccgcaaacaactgttcaatagcagcggctgcttcacttcgcatttttttcttttccgtttgttctttgaatgtaaatggaatcgttgtatatactaaatctttcggaacgtagttttccggaagcttgttttgtttattcacaacaacttggatgctttcagggttcgaaaccactttcatgccagctaatgctcgtacgtattgaccgcttacatagccaaccttaccttgatacgtaattttcagccagccgtttgctgctttagccgtcacgtcgagctgtgtgccggctttaagtgttgccatgacagcaccagatgttgaagcagttgttcgaacatttaaattcgctgtcgccacatagacagaagctgccggagtaggagctggagccggttcagaagaactcgttgattcctttacatactgcgtgctcacatagcccgttttgccttgatagcttacttttagccagccgttcgctgcttgttctgtcgacgttagctgcatgccttgtttgaccgttacaacaatcgcgcttgacgtcgagggaccgcttcgaatatttaaatttgccgttgttacataggttttggtcgttgaactcgctgactttttaacatactcactgcttacgtaacccgttttgccttgatagcttaccttcagccagccgcttgctgcttgtccaactaccgttagctgcgtgccttgtttgaccgttgcaataatcgcgttggacgtcgatgggccgcttcgaatatttaaattcgccgttgttgtatatgtttccgccgctgcgcttgcgacagttgactcacccgtaaaatgtaaagaatgaagacctagagttcctgcccctacaagggtaaaagcaagacctgttaccgctaattttttgtaaaatctttgtttgttcacttctgtcatttttatacctcatttgcaaaatataatagaaatatatgctgctagtttaataggttaagtgaaaacaggatccgatgtttaagctcaaccttaaactagctacattaaataaaatcatttgacgtctagaggctctatacatttgttcgttccagctagcacgtatctttagaataccggataatcgtgtcaaaagtatatcaaaatatttcaaacttgtttccaaactgatacattttcaacaaaaatagaataatagagcagaaacagcaaaaaaacccttacgtttactctcaactgcttagggtagaaaataactaaaaacaaagattgagatggtgataaaatgaacacggcaaccgatttttccttaactgcgtttcgagaacctcacacattaaaacagcatatttttgatacgcttcatttctactaccccgcttgtattgacaaaaaaaacggcggatatatccatgaatactacgacgacggtaccgtcaacaacacgcattcaaagcacttggtaagtacggcgcgctttatttatatcttcagtgtaggggctcttttagacggaccggattggtgcaaagaagcagctcagcacggcattcgttttctacaaaacaaccattatgatagaaagcacggcggggatttttttgaagtagccgatgacggagaagtaaaagatgattcgaaacaagcatatggccacgcttttgctcttttagcttcttccatcgcgtatcaagccggcatttcagaagcaaaagaaacaattgaacaggtatatgacgtgatggaaaagcacttttgggaagatgcgcacggcttttaccgagacgaatgggacgcttcttggtcagctgcttctttctatcgcggccaaaacgcaaatatgcacatgtgtgaagcgatgctttctgcctttgaagcaacaagagataaaaaatacttagaccgagcgtacacgcttgcaaaaggcgttacgcagcagcttgctgaacgatccggcggcatggtttgggagcactatgatacagactggcagccagattgggactacaataaaaacaatacaaaagacgaatttcgtccgtacggctttataccaggacatcagtttgaatggagcaagctgcttttatggcttgatcggcaccgttcggaaaactggatgacagaacgtgcaaagtatttatttgataagggctggaaccggggctgggatgctaagtacggaggtctttactttgcgctgtcgcctcaagaagaggtcattgaccgggataaaaactactgggtgatggctgaagccatttctgcggcttcactgctcggggtaaaaaccggagacagcggatattggaaagcatacgatgccctgttctcctactgtcagaaacactttatcgatcacacatatggaggctggtatcagctgttaaatcagcaaaacgaacgctacagctcgaaaaaaagcccggctcctaaagccgattatcaccctgtggcagcttgctatcaaacgctgatagcactgaattctctttgaaagaatgatcatgaagaaaccgttttcttccaaatgcgtttatttcttttatttaagggaatttacttactaacaatcattgtttacacattttagaaaaagctcgactatatatatgcaaggagtgaggacgatgtatttttacgcgttagcacaaggaacagattctggagatccagtaacactgcaccatgagaagcaattttcgaaaaaagaatttttagaaatgtttaatgaagcattagatgagttggatacgcatccatctccaagcgacgtcggtgaatacctttgccgtgcgtacggatttcaagaaattgaaatcgagacgggtgttgtatgctactgcgctccgtttagaaagctagacgactcagatattatagaagaccgcacgtacatggacgccacgacagggacactaaaatacaactaattaaaaagaaaggttggatgcgtgtgaagaccgtacaaaacatttatcgaacgagtgaagctgtaccagaatcgggggcttacatttgtgcggaaggtgaaattaaactctttcaaaaagatgatctttttacaccttgcccacacacacgtgaatcaacgacgtggaagcccgtagatgacgccttttcaaccggagaattggttccgcaaaccggtcgctataccgatgaaaacggcaatcaagtaaagctaaaagaaaacgatttatttccaagatgccttcgttcaggtgagcctacgacgtggagaagaggataacaaataacaaagcagccgcttattaagcggctgcttttattaaagcttatttaaaaaatgaattcttttttcttccttttaacaaatcgcccgtccaccctttcattcgtaaataaagataaatagccacggtcgacagaacaatcaaaataagcgcatagacatagccaaacttccagtcaagctcgggcattcctttaaagttcattccccaaagggctccaaaagccgttaaaggcgtgctgatggcagtaaggagcgttaaagctttcataatttcatttcctcgatgagtagacacaacttcttctaatttaattaacgcgtcaaattctttttgatattgttcaatcagtgttaaaccaatttcaatttttttacacatccgctgatattcgaccgtttggttaatttttttatgaaacgcttcttctattcccatggtgacttctcgaacagaactgattaaatttgtccatataagcaggtcgtaccgcgctttatgaatgtcatccaacacgtcaatgttattattatggcgcacttcccacagaagctctctgaaatgactttcaaactgatcaaacccatttaagtgttttttcataatttcgcctaaaagaataaaaaaactttccgccgtgttagcagactgcttcattcgttcaatcattcgttcatgattggtgttctctaggattttcaaatcgattcctgccgttataataaactcctcggtaatataaaaatgaaacgaatcgtaatccctttgatcaaacgacttcttatgataaatcaacgaaccataaataagctcgctttctcctatcacgtctacttgaatatgattagaatttttcttttgaagctgctggcaaaaccattcatctcttggatactgatagtctttgattatatcagctattccatctgcttcttctaaatcaaactgataccatttccactgatcgttcgtcacggtattcatactttccctctttccccttttattagaatttttccctatatacaatcacttaaaacctaacataaaaaataaacatacatttcatatccatctttataaaaaagatgctataataaatacgttgcgcacctgcgcatgctttataagtttgagaggagaataacagtgaagaaagatatcgctttacgttcttatctgctagaaagtgcaccaactatgacggaagaatggtatgaatctttggacaaaaaatcttctgaaggcgtatatacctctaatgatcccgacgtcattcaacgcttaaaagcgcaaaactatgaatttcatttatatattagcaacgtctttatagaagatgaaaaaagcttttttgaatcttttaacacgtggctaaataaagttgccaaagaccaacagcatcttagaacccccattcaaagtattattaaagaatttatgaacgtccgcaaacaacactgtgagtatattcgccggtttgcagagcttcatgatgacatcactcagcagcacatcgatgtatggaatgaaaaagtaataagagtgtttgatattattattttgaaattcatcacagaagcgcaggaatatgcatcaaaccgcctccgctctcagcaggaaatgattcatgaattaagttcacctgttattgtgattaaaaaagacgtggctcttttaccattagtcggcgatattgatacggcaagagccaaaatgatcctagaaagcacgttaaaacagtgtgcagagaagcaaatctctcatttgtatattgatctgtcaggagttgtgatgatcgatacaatggtcgcgcacgagctgtttcagctgataaatgcgcttgatttaatcggcgttaaatcaattttatccggcattcgtcctgaattagccactactgcgatgcagcttggtttaagttttgaccatatacgaattaaatcgaatcttgctcaggcattagaagatgattcaaaaattgtaattgcttctagcactcattaatatagggatacaaacaaaaaacagcccgagaaggctgttttttattttttatgatgaatgttttcagaacctgattcatccttcgttttcgttttatttttctcttctttttgttcaagtcttatatcttccaatggcataggatcgaccgtttcttcttctttgaaacgttcaaataacgtttcgtcttgatctgttacacgctgttccgtttcatctcttttttttggtgtatttgaaatagatcttttctggcgttctcccatcttttctcctcctttactataggtgaagcaattatgtgttcatgaaatctccgccgttgacatgaagcgtttgacccgtcatataagatgaatcatttgaagctaacagtacatagcagcctacgtgctccacaggatgcccaggtctgcccatcggtgtgtctgtaccgaactctcctactttatcacccgagaaagtagacgggataagcggtgtccagattgggcccggcgctacagcgttaacgcgaatgccatctttgacaagcgcttgcgccatactgcgcgtaaagccgttgattgcaccttttgtcgccgtataatcgatcagctgaggatttccgcggtaaggattaattgacgttgtattaataatcgcactgccttttcctaaataatcaagcgcttttttcgtaaaataaaagtatgaataaaagttcgttttgaacgttcgttcaagctgttcactcgtaatttctttaatgctttcttttggatgctgctctcctgcattgttcacaaggatatcaagctttccaagctcactcactgttttttctaccgcttcgttacagaacgattcgtctcctacgtctcctgcaatcagcaagcatcttacaccttcttcttcaatgcgggcttttgtttcctcggcgtcgctatgttcgtttaagtaaacgatggctacgtccgctccttctttcgcataagcaatggatacagctcgtccaattccgctgtctcccccggtaactagcgctacctttccttttaattttcctgtaccaatgtaattgtcatcctcataaatagggagaggattcatctcactttcgatacccggctggcggtcttgcgtttgttggggctgaccttgtgtttgttgatcttgtaaattcattttaatctcctcctatttttgatggaactttttagtatagtttaggtttagccttctgttttgaagttcaaacatctttttttaaaagtttatgaagtttctattctcttttactatcttagaaaattcatagaaaacaagtttaaagttggaaacaaaggctaaagaatgagtagaagatgtatttcagaaatatcttttatcaggaggtttggttcgtgtatgaaacacattcaagtagcagaaaaccaagaggaggcagtctgcgtcatccattcttttttaaagaaaggatttacaagcaaagatatttatctgctggcctatgataaagaatgggctcagaatttaacggaggcaacacatacaaaaaagtacagaatggcagagcaaggtatgtttgaaacggcggtaaataagcttctttcaagagaagatgagcttctttcaaagatggcttcgctcggcttatccaatcaagaagcaaaccggtataaagaagaaatgaaacaaggaaatatcgtagttattggcgcacagagtcaatcaattccctactaaaacagcggaaacgttttttattagcttataagggtatttagtaaaataaaccattgtctatcaagaaaggaagttataacgatgttaaattatttgggaattcagataggctccctttactttcctactagtattttgcttatcacgtttcttgtattaatcggtttttttatttatttcctctctagaagaagaaaaaaccgccatgaatcacgtgagcaatcacgaggaaaataaaagagaatgccaatttaaaagcccttcattcagaagggctctttgtactataaaacaggcagatatttttcatagcgcgggtttacataaaaaggtggacgagaccctaaaagcggcagctcaattattaatactgcttcaattgtgacgtataaaggctatgaacagttaattgactatacggcaactaaaggagccattgttggctttactcgtgcgctttccaatagcgtgattaaagacggaattcgcgtaaacgccgtagcgccgggacgcatttggacaccgctcattccagcaagcttttcagctgatcaagtaacgcaagtggacaatccgatggagcgccaagggcagccgtttgaacttgctccaacctacgtgtatctcgcaagcgacgactcacggtttgtcacgggggaaacgctgcatgtaaacggcggagagtgggtttcttcttaaaaatctcaatataaaaagcgtgaagccaagctccacgctttttcattatttacgggtttctttttgcaaaggcgatttttcaatggaacgtgtaaaccggtaaacatcaagttcttgtcctacctctgaaggcaaatacccaaacgttgtgaagctgtccactgattccggctcaagcgatagagacaataaattgttttgcggctgagatgttaaaaagacgtagcttccttttgggaacgtcaccgtttttttcttcacgattgtttgcacgtctacatttggtttgttttcgtaggcttcattttcaatacggctgctgaccgaatacgcttctactgaaagagccgtttctttcgttaacttgaagccttttactccttgtctctgcaattttgctgctaactcttcatgtcctgcctttaaaatgtaagcagttggacgttcgcggacaagcgtcggcgttgccgctttggcactatagtacgtcacaggaatttctttaacagacgcgctttccacatcaaccatttctaacgtagagtttggtatttttttattttcactgttcacaacaattggatcatgatcatttgcattttctccttttttgacaagagccgctttttcttttgcaatcagcgctttaatttgtttggcatgggcggctgtttgcgtaatgagcttttcttgtgtagcaatttgggcactcactcgccgcggaaaatcttctcgtccaatgccaattcctctgctttccactaaaaacgaaaacgatggatacaagcctagtgaatttcggccaattctcggttcaactgagccttcttccacttcaagctgcccttgtttattcacttgagacgtatagtatacttctcctgaatatccttgcttttcaatggctgtaagcgtactattcacaaacagctcatcagacacgtctcgaatgttctgcggaatatttaagtttcgaccagactgcagtaaaatatcgtgatacttccacacgccttctttaccgatatttttaaatccgctgctgtaaggcgtatattcatgagcgtcgatgacaacttctggtgaaaaacggttaaattcagctcgtacgctctgcacttccgggctttcaagctttatgtagtcgcggtttccatctaaattattggctagctggcgcttgaatgcataagatccgtctggattaatgcgcgggacaataacaatgttcactttatttagcacatcttttccaaagtcttctgtcaaacgcgttgccacggcgagtacagattcaccgcttgccggttcatttccgtgaatttgactttgaagccaaatcgttggttttttagatggttttccatccgcaaacttcttttcctttgaaaaatacagagctggaatgtcacgcccttgctgtgatttaccgataatcttcagctttacgtacggacttttatgagcaagcttttggacatagctcatcatttcttcttgagtcgtaaatgcgtcttgtcctttcagaaatgccggcgtcgcttcattcacctttatttccggataaagcgctttaattttttccggctgactatagtcttttccgtaataaggcatctcagcttgtaccgcaagtggcgacagcaataatccaatcgacaaaagagccggcacggccgttcgttttacagtttttttcattcatttactcctccccatccctttgattagacattttaaatttttaaaatatttaaaatgtttcataaataattataccgtttaaggaaataacttcaagataagggagctgaacctttttgactattttaatgtaagagaagagtgcgattttataacaaagagattaggacataacaaaatcaactctatatgaagacgaccaatcaggataaacgatctcaaccgcttttcccgcaggatccttcaccttcaattaactgctagaaggaatgaaacaaatgaaatctccgttcgctataacaaaaaaatgcacccctaatcaaacatgttgatcaatggttcatttttcatttcagctaaaatacgtttgttccagcctcttttttatgtatgaactgctataaaacttagcatttcctcgagcccgttttgcgctagtctagctgtttcatattccatgcagctatctctcctatgttcatttctttacggattctagcgtttctaaatcatatcggccaatttctttgttgtttctcgtgatgacgagttttccatgcctcgctaccttttggagtttttttaatttctgatcagatggagccataggcatttctttgtttttaacagtcgcgcccagatcgtagtgcacatcgacttttccttttttcatatagtcaaactcttcaattcccatacctgtaccgaacttctcatgcccctcatcaaatacattaacgcctactgtattgatagatgctttctttaaatcttcattcggtataattttagcttctatttcgtctttatcattttgatagaatttacgcttgccttgctgcttcattttaaactcgtaatacagcgcttttggttttacatcgaccatttttcctttgctatcttgtataccaacttttccaattaaattggcatcatctgttatcttgactttcactttttgaatgctatagccgctctcttctttgctagcagagtttgagcacgctaccaatgacattgccaaaaaagcactcaatgtgcccaccataaatttcttcactttatcactccctgaggattaatataccataaaaggaatttaaatggatgtttctcggtcgattttgtaaataagtaaagaggcagcaacctattgacttaagtttccttatcaactctatagaaacataaaaaaactctctccataaggaaagagctactctatcacaaagtccgcttctgcttttactactccgtttacaataacagaaagcgtatgcgtgccgctgtaatgttttcttgtacttaaatctttaaacgcatgcttttttgtgactgtcagcgtttgacctgcttttgcttgaacattttttagcataaacactttttgagtgcggtttccttttgcttttacgtaatgaattccgtactctatgcgaagcggcatgggtttttccacggatagttcaaaggaaaagtcaacgctatcaccgattgtaatagtatgcggctgtaagctaagccctgtgacagtcacgccaggatcatctccatagccgaaaagagacagagcttcaggatctccttttttcaaaagtgagcggcacgcatgtttaacgatccagtcggttttaacgtcttttccgtaccagcttttcaccacatcaagcatccagtctttttctatgtaagaaatatcatttaaatgattggctacgctttttcggacatagagcgattcatcgcattttaactgttctaaaatcggcagcgtttgttttggatctagctttaacgcaggtactgattgtccccacggaagtctaggccggctcccttcgcttgctaatctgcgaatatgatggttttcatctcctgcccattcaatcatttgctggagcattcgatttttatcttgaattaaaaacggacgcaccgcaaattctgatgtggaaaacggcgtaaaaaaagcgagtgcttttattgaagcttcccaatcgtccaatccatacagttcaacgtaatctggaaaaatcgtgccttgaagtcctcctaccgttggagccactttatagaggatatgaagtgcttcttcataatctcccggcagcacttcatgcatggaaagcgtaattcttctcatgcgctctttcagcgccaagtcttgccaatcttgttgaaaaacaagcgcatgaaatgcttttttatcaaatgaactcatttcacgtgaaaaagcgtcgcttaagtgcgtaatcaattcttcattaaacacgcttttacgtaattcttcagccatacttatccctcttttccaggcagtattttattttcttttgaataaatcgcccgctcgtacatcccttttttaaaaatttgcatgaacagctgcttatttttaacttctttaaatccgtactgactgtacaaaccgtgagcatcttttgttgccaataaaatttttcgtacgtgttgaatcggctgatagcgaatcatttcttgtaccagcgcttttccaagcccattgcctcgtgcgtgcggaagaataaacacatccgccaaataagcaaacgtcgcaaaatcagaaataattcgtccgaaccctacttgttcatcgcactcatcatacacgccaaaacaaacggagtgttcaatagacgtttgaacaaggtgaagcggaattccttttgcccagtatgattcatgatgaaggtacgagtagatgacatctatatcaagcttttctttattcgtatgtatggtaaactgatgattttctttcatgctgcatcctccttgcttctctatcatagcacaaatgttcgtaacagaaaaaagccttttctgtaaaaggcttttttgcttagtatgatatttttttagaaacagaagcattttttctatagcgtcttacgactatgtaaataagcggactgccaataatcgtcggcaaaaaccaataagaaagtgccggaagcttgtttaacagcggaatactgtctccaacatttacaagcagtgcggtaacagctccgatataagaccccagcataccgcgaatatgatgctgaagccagttcttccattttcgcttgcgtgctgcatagccataaatcgctaatccgtatgaaaacacggcaatataaaataaataagcaatttcattccatttccaaatcgctaacatgatagctgtggcagctagtgctgcataagaagcgtgatacacttctccccatttggtatgccgtccttttttcttagccgctagcatagacaccattcctgaaagcaaacaaatcatgcccagtccaatatggatacttaatataactccaaataaatccaacgtgctctctccttttacgtacttctctcttatatcttcggctagcggacttattttttaacaaactattcctatttgctttccaactctttacttacatgatgcatatgctacacgttaaaaagcgcatacttgcttttctttatgtattatattttgctaacggagccgcgcgagtgctgcgtgatctcgcagcaatgcttctcaccctcgtctagccccatacgccactttttatgctggctttaatcactggcggcttctttaaaatcggtctgtttttctatgccactgtgctgagcctttcctacgtttttaagcttaaaaacccgtcaccgcttgtgtttccaatcggcttagtcattttgttttattcattgtctcttactcaaaactatttcgaacacgtatatgaagggttaaaaatcattccgttcactttacatcttccgtttcaaattgtcattcctgctcttttactcgtgatcgcatttttaagaaatcgaaaaaaaatacaggccgtccctatgaaaaataccgcagaaaattcgtagtatgtccatttctctattggatttaatctcctaaaattatacaatataggtaagaagccaaaaggagaaccaatatgattggattaattctttctattttagtatttaacgttcttgcttttaaaacaaacaagcgcttcacgacaaatcaaattgtacacatttggatgttcaccattgctgctcagcatatctttgatgtcttcattaatttcaaatttcgcggctactggtattttacacaagagacagactggcaaggtattttcgcctatactgttctcattccgcctgtaaacatgctttttcttacctactatcctttttccggaaagctcacaaaaaaagccgcctatattttactttggtcggttgctgttttactttatgaagtagtggcccttctccctgctccatggggttattttcactacggatggtggacgtggtggtattcgcttctgctaaatccgctgttgttttggatggttgtgcagtattaccggtgggtgtgtaagttggagagggattctaaaacaatataaggaatcaataaaaaaatagcttttctccaaaagaaaagctgtttttttataaaatttattattttaaagtactatccttcttctccctcacaaactccatcacaggccccacaataatgcaaatccctgcgataatcagccagccaaacgcaagatacgtccagcctttaaaaaaggaaagcgtgtattgatagcccgttaaaaacatcacgcctggaaacaagaggacaaataagaatgtaagtcccagcgcccagcgcgtacatagctttgcgtctttatttaactgttgttgtggatccatacgccacttcctcccttaatggttcatctccatgttcatcaaagcttttaaatttatcttttagttcatcaaagtcaaattctttttcagcaagtaagccgtgtacaattgatataaccccgctgatgataaaaacggtagaatttccaataagcattggatacagtccgccaagggcttctacgttaatgtgaccgttaatcaagtaagcagatgtgttccatgcgacaacgcctccgatcattcctaacagcgcaccatagaatgcacctgtgttcgtcgcttttttccacatcagtccaagcgtaacgggaataacggctccgctgacgaaaatacccatggccatataaacaaacccaaggctaattcctaaataaaacagtaaaatggaaaacacgcccatcgccagcccgaagccaagcgtcacttttcgcgatgtgcttaagatttttttactgcttgctttcgggttgatagaacgcaggtaaatgtccgttacgataatattggtaatcgccgttaattcagctgctcctgtcgacattactgccataaacagcatcgttaaaaacaaaatagaacctagatttccaagcacgtgtgacgccataaccggtgcaatggaatctggtgaatcaacggcaattccaagaccagccgcgcttacgccgaggaaagtggcaaccgcaaatggaatcgaaaaccaagcaattccgccgtaaatatacgcttttgaagcagcgctgtttttacttgcaatggcacgctgccagtaagcttgatctacaaagaccgtaccgaagttcccgataatattaatcatcccaaacaaaaggcccggcaccgatgccatcgtaagcatatgctgtgattgaggcagatttttcagcccttcgtacacgcttgttacgccgaacttataataaacggcagcagcaaaaataaataagataacgaaaataaaaacggtgttaaaataatcagcaacaaatgaggcttttaaaccgccaatcatggtgtagattgtaaacgtaagaggaattaaaaaagcggcaacaaaaatattcatcccagtaagagagtttaaagcaatggctcctcctaaaataaccatcgcggtcacaataatatttgtcataagagcaaagccaagcattaaacgatgatttttcacgtcgaagcgctgtgcaataaattctaaaaacgtatgagcgttcggtgcttttttcttcaggttaatcgcgacaatggcaaacagcaaaatttgaatgcttgctcccgctgcgtaccaatacggtccgctaatgccgtactgataccctgtggaagaagacatcattaacgtagcggcccatgtccatgcagcaataatggacgcactcgccagcccaacgcctacatttcttccggctgtactaaactgctcagccgtcatttcctttccttggcggcgctgcatcatgattgtaacggccgtaaagcctcctccaaaaatcagtaaaatcaaataacccacgcttgatgaaagcatcttatccctcctcttcctcttaatgttatatttacttacattaatatgtaaataaaagtaacatttgttaataaaataccacgccataaatttattaacaatactgtattttctgattattaaagagtataattagatgttttctccttttacacacaaaaagccggcacattcgtaccggcttaagtgtgaattttcgttttcaacatgttttatttcctgacatgaacgaaataataaaaaaataaaaaacgatagcccttgaggctatcgttttttattattgagataccattactttttggcgaacgtgctctaagtgatcacgaaccgcttctgctgcttcttctggatctccatttttaatcgcttcaaaaatgcgctcatggtcggcgtcagtttgcttgcgattttctttttggcttttatttaacgaataagcaagcgcttttcgatacaaatggcctaaatcttctacagcatgaagaaggaatgaattatgagctgctttcacgatatcatggtgaaaacgatagtccgcttcatgtccaatttcttcactgttatgaaccgtctttttaaatgcttctaacgattctttaatttcaatcagttcttcatctgtgcggcgcagcgcggctaagcttgctgcctgcgactcaatgataatacgcatttcaattaattcaagcacttgatctgcttcaaccatttcaaacgtcattggatcaagcatacccactaagtttacacgctttacgtagcttcctccgccttgtcttgattcaatcaatccgctggcagaaagaacgcttagcgcttcacgaattggtgcgcggctcactccaaacattttggataactcatgttctgacggcaaacgagactctggcgggaacgttttctctttaatcatcttttttaattgaccaagcacttgactagacacttttttacgctcaataggtacaaacatacttctattcctcctccaagtaattatctctctctttttatagtgttcatcggctccagtataactgtgtgtattccgatttatgtaaacgcttcaatctttgtattacaagtatacattatttcaattcaaatgtgttgataaaattttactattattgttattataccatgaaaacaagttataaatgaataacgattcatggttttttgacataataccactatcttacatataatccgtatacaatcataatcgccgcgtccgctaacgcatgactaataattgccgcttcggcaccatatcgctcccttatacacgcccacattatacctgctaaaaaaacgcctgcagccgagatccaattaaaaggaaacgcaaaaacgggcagaataataaacaggtgataaagcgtataaaagcttgatgtaacaatggttgaagcgggtaagggtagatgcttcttcactttattctgtatatatacgcgccaatatatttcttccaaataaggattaataaaaatcaaaatgacggctaaaatgatcactttccatccgctaaatccccatatttgcaaaaccgtttgcatatcttctacatgaaagattttaccagaaaaaagcaggctgcttccaattatcacagcggcacatagaactccgctcagagttcccacatacagagatttttttgtaagcgctacctttaagttaattttattatttgcatataaaatcataaacatccagccgtaaaagcacacaaatgttaccaacacattttggataagccacaaaccgaaaaaaacaaagattgtaggcataagcagcaaaaacaaaaattttatcacgtttatggcgcaccttctttaagagccgcttttcttttacctagtaaacctttcgtattcaaaaggtttactatcttttatcttataaaagtccaggggtattttcaattattttttaattcctgctccagctcacgaagactttcagcaagctttttcttttcttcttcaaagtgagcatcatttctaaaagcaggagctgaaggctctgtctcttcattttcttttagccaatccggcgtcaattccttgcgaacaacgcgctttttattaacgtaggaaagcggcttttcagtctgataactcgctagcgtgcgctgtgatgttacataatgcttatgaaaaagatgctgtttaatgtaggcaaatgctcgaatggtatcgctgctgtatttaggcacgtagtaatcaaatgcttcatgcagtccagctagcgcctcttctataggtatttcgcttttggcgacttcatacatatgcttcaagtcactagctgaaggatacacccctcggtttcttctagcaataaaagcggcttctaacgtttgtacataagcgtcatgcgcggcttcttctctttttatttgatttgtattttctgctgtagtctctgttaatgaagccttcactgtgacgggctccgctgcttcaatttgactctccccttctgtcaaattgacatcttcgagctcttcaaactcatcgcttggcataagctcttctagtttcttataatcaatccggtaccaaacggtgttgttaaatttagagcggttgtactttccttttataattaacccttctttttcaagctttgaaatgatgcgttgaatcgttgaaagcgaccaaaacggaaactgctgcagccactgctgattggtgttgtatacccatgtatatccgtcctgcacgtttacgcttttttcaagccagtagtgaagctgctgaagaaacagggctccgttcactcctactttgactgccagcgccggcagtacaattaacggctgatcttttaataataatttactcattatatcatctcctttgttatgtaaaatagctactatatatatacaaagaaaacgaaaaaacggggatgcccgctttaaaattatgttaatatatagaaaaaacgaggtgagcatatgatacgtcaaggcagaattggcgatgaagcaggcatcgcaaatgtacacgtagaaagctggaaatcaacttataaaggacttgttccggattcttttttagattcattgagcgctgaaaagcgaaagcccgtctggaaaaagcagctggaatcaaattctatttttgttgcagaagaaaacggtcaaatcgtaggctttgcttcttatggcaaagaaagaaccagcaagcatcctttctataaaggagaactgtatgccatgtatttactcgcagagcatcagcgaaaaggaattggaaaagcgcttatgcataaaatagcgcaagagttggcaaaccaacatatacatacgatgctcacatgggcttttgaacaaaacggcgcctgtcagttttacgaagcacttggcggaaaaagaatcaatcgtgctgaggttgttattgagggtacatctctatctgaagtggcttttggatgggacacgcttaaaaatttgtaagacaactctctggacagatttttttcttcacggtaaactgtttagttggtataaaaagaaaggatgacttaccgtgacgaattctacttatcgaaacattattctgctggttctttgtgtcacagcgggtatcgtcgatgtgattggctacttaagccttggccatatctttactgcaaacatgaccggaaacattgtgctgcttggattagcaatcggaaactcgcttgaaacaactgtttttcactctctgacagctttaggaggcttcattataggagttgtaggagctgcaattttagttggaaacaaagaaaaaacgttttggcctaaagccgtaacgatcgcgcttggaatagaaggattaattttacttgtttttgcacttttatcttcgttttctccttctttacacttaacttacttatttattttcttattaagctcagcgatgggtcttcaaacaacggcggctcgaaaacttggcgtagccggcatttccacaactgtattgacaggcacgcttgctaacttttttgaagacgtaacggcacgttttcgcagttctcgctaccgcaaaacgtttaacaccgatgccattcttcgtgcgctgtctcttgtgctttactgctttggcgctgctatcgccgcgcttgcagagcctgcttataaatttgaaattatttggctgccaattgtgattctgttagccattatcatttttgtcagcacgaagtttcgttctgattcagaaaaaaataataatgataaagacccgtttcgataaagaaacgggtcttttattttcctgacagtgccgctaaaacgccaaaaatgattgctgctgcaggccctacaatgaatagtccaattaaaatcgattgtatggcttcccataatgaccgcaaaggaccttgcttagactctgctttttccactctttcctctaggtgttcgactctttgctgaagcttcgctaattcctgcgtaacatctatttgttcgctcatcgctcaagctcctttttactctacattaccatatacttccttactaaaactactatttatttgtgattacttcaatgccgatttcgcggtaagcatttaacacggtttcgttcacatgttcttctgtaatgagccaatctaatgagtttgctgaactgaacgtgtacgttgaagacgtattgagttttttagctgttacaatagccgctacttcactcgcacttttaatcatttgacttttaatgtgcatttcttcaagcaaaggaatgctcataccgattttaggatcgattgcgtatacacctaaaaaacaaagatccgctcgaatttgttttaacgtatcaaccacgctttgtcctaccgtgaccatcgattcttttcgaaacgttcctccaagagaaacaacttctacaaagtcatgttccgctagtgcaacggtaattaacggactgtttgtaatgacggtaaccttcaaattctttggaaaagctttgacgagctgaatatttgttgtacttccgtccatcaagagcacctgcccgtctttaattaacggaagcgccgcaacggcaagtgaatgcttaacatccatcaattcacgttttcgctctttgtaatcaaccgcagacgtggaacgaggcagtgctcctccgtggacgcgctgcagcagaccaagcgcgtccatttcccgcagatctctgcggattgtatcttctgaaacattcagcgtttggctaagcgttgtagccacaattcggccttctttttcaagcaaattcataatttgtttgcgtctttcttgttttaacattgcttgttcacctgttttctttctgctttttactttattatacttgtttcttttgtaaaaacaatgtaaaaacacttgattatcagtgttttttcgtttattgtaggataaacaagataaaacgcgcaaaaacaagtaatgatagtcaaagggagagatagtttatgaagatgatttttacagacttagatggaactcttttaaatagcagcagtgaaattagcacaattaatgcagaagcaattaaaaaagcgcaaaaacacggagttgaagtcgttgttgctacagggcgcgcttatttcgatgtggaggaaattttaaaaaaagctgagctttccaacctttgggtgattgccgcaaacggagcgactattcatgaccccaacggacagctcagacattctgttccaattgatgcccaccacgtaaaagaagcgcttcagtggctggatgcaaacgaattttattatgaagtgtttgctgaacatgcgatttatacgccaaactcaggccgtgagctgctggccattgaaattgacagagtaaaaagcgccaataaaaatgtggacgaagaaagacttcatcacgctgccgctaagcagtatagccaaacgggatttgcctttgttgcatcgtatgaagatattttaaatacaaacgcggagctttataacgtattagctttttcatttgatgatgaaaaacgaaaaaaaggctgggatcactttagcaagcagcacgacatgacgcttgtctcttccgctgatcataactttgaactcgaacacaaagatgcgtcaaaaggaaacgcattaacctacgttataaaagagcttggcggctctcttcacgataccattgccattggagacagctttaacgacgtatcgatgctgcaaacggctggaaaaggaatcgctatggcaaatgcgcacgcagaaattaaagcactagcagatgacgttacattaacgaacgatgaaaacggcgtagcttcggttattgaaaaagtgttagaaacgcagctagaagcacattaaaaaaacgcttggcgtatgccaagcgtttttaaatggtcatgcggtaaataccaacaaaccagctaaacagcgcaactagaaatagcagccatgcgctggttttctttcttttttgccactcgattgctcctaaaactagcatggtaaacccgagcagtatatttaaaaatgaaaggaactggtagctgtgagtgagcatgatataaagagccagtccaacagtaataattgaaagaataagctgtaatgcttttaacaaaaaatctctccttacttgtagttcacttcttcattcacacacgtcactaaaggctttttctcaaggcctaacagcaagttctgtacggctaaatctgccatgcgattgcgcgtttcgtacgtagcgcttccaatatgcggtgttactaacacatttgaaagctgcagcagcttgtgatctgccggaagcggctctgggtctgttacgtccagtgcggcatacgcaatttcttcatgtttcagcgcttcgtacagtgcttccgtatccactaatcccccgcgcgctgcgttcacaaaatacgcgctgtttttcatggctttaaattccgcttctccaaacatgcctttgctttgatctgaaagcggtactaagcatacgatacagtcagctgtgtgaagcagttcttcaaacgaaagatatacggcatcaagctctttttcggcttcatgcttgcggcttcggttgtggtaaacgatgttcatacccgatgcctttgcgcgtctggcaacggcgcttccgatatcgcccattccaacaataccaagcgtttttccaaataaatcgacgccaaacaccgtttcccagtttccttgtttcactttttcatagccttcatgaatgcggcgagctgctgacagcaagagaccaaacgttaaatcagccgtcgcttctactagcacgcccggcgtattactaaatggcacgccttttttggtacacgcttcgacatctacactgtcatacccgacgcctgattgagaaataacgcgcaggttcggtgctgcttctaacagctcttcatctactgtgatgtggccgatattaaaaaagccgtcagcatcacgaagccagtcgcgcagcgtttcttgtggaatctttccttctccttcccacatttgaatatcgcagtgctccgctagcttttcgtaagcatttggccacgtctttccagacataacaactttgtatttccccatgtgtatctctccttttccttgttcactcatatgtatgaatagcaactagctatcctatcataagcctactataaagatgaaactttttccattcaggaaccgtatttatagtaagggggaatacgaatgtttgaagatgaaatgatatttgaagatgatccgtccggagatgacattgtttttgaaggtgatgtgcccgatgacgtaagcggaggcgctttttttccagatgacgcgttatttaacggaatgcctgcgtttgtgatgctattttttgttattgttattggtatttttctattttctatctttaaaggaatcagcacgtggagtaaaaatgagcagtctccccgtctctccgtaaaagcaaaaattacgggcaaacggacaaacgtccaccgccatggcggtcatgctcacgaacatcatcactctcacacgtctacaacttactacgtaacctttcagtttgaaagcacagaccgctctgaatttactgtttcaggacgcgaatacggcatgctagcagaaggcgacgaaggaatgctgatgtttcaaggaactcgttttttggattttcaaagacatccaagtgaagaacatacagatgcttagcttatgacctcttgcttttagaggtcttttttactggaatgaggcatttatacagcaaacgacctatttgtgccctttttacattctacaagaacgttattcaatacaaaaacataccgtgtaacacattcatttaaacaggcaggtgattttatgtattctccttattcaggcagcggtctctactacggacattacggcgaagcccctcattcgcaccctattcaaacaatactggcacaatactggcatgaaacccactatccaggtccacacaaaaaatatgtacacgtgtattatcttaacccggcttctcttcattattatccaacctatcaaagatttttgtaaaaaactggttatccccaaacttttgtattataaaattaatccatatactttttatttggaaaggaggttaaaaacagtgcgcaattctacagcaaaaaatagtgtggcgatcaccactttgctttccgccctatttttctgctctatcatagttcttgcttcgctttcttctttagcagattctggccccaacgttaacacgttcggttcagttgggatgtggttatctcttggcatggttctatttttatacctattgcctttagctttttatatgttgggaatgcatttcttaaaatttgtcatggccgctttttgcagcattggccttttaatcgctgctagtactctattactgatgccggctctgtttttattcggattagaagacttctcaggaaactcagcttccatcataggtgtaatgatttcttgtttgggcttactgatcacgaatattgtgtggtttgttgctgcgtttaaaagaccgtcagctaccgtacaggaaagcgtttaaaatggtaaacagggcgagacatagctaagtccattccatttaaagacgaacaaattggagagatgagctgaactgcttgttacaccgctgttgatttccgtgcaagacttcgctttccgcgggcggccggtgagcctcctcgtagtttccgctcctgcggggtctcacctgttccgttttcccggcaggagtcttcgtcttgccctccaatcatcagctagaagcagccatatacatgaaacctttcaataaaaaattccaacgagttggattctccaccaagaatctcaattcatcgttctaatcttgtttcaactaacatacttttgtcgcaacctctttttatagctcggtaggcaagtagtgcaaatacatatctaagcagtcttcgtactgcgacaacacatccattgtttttttatgaggttttgtataaataactggatagtcaatttcaccccgtatagaattcgctggaaaagccagtttttctttttttagcgaaaagtcggtctgcactccttctttatttcctctcgcatccaatcgaatccatctatcttcacttttaatgtaaactgcatttaaagcatgaatacagtagcctgtgtctatcgtatctccaagtatcagcctttgataacaaaagcctgcaggaatcccttctgcacgcagcaaagcagctaatagattacacttgctgtaacaaattccttccttttcttttaaagcctctgaagcggttttcgtgatgattttgctttgaatatcccaggaatgagatacttcatctctcacaaactcatatgctttttttatgtacgctagggaagaatgaggtaagccgcttttgagttcacgcaccttttgttgaatcaaaggatgtgtaaagttcacttctggaagttcttgcgtgtagtcttctttttccaacgattcacaaattaatttcatttactttttcctcctcttatattcatcatatatttttttatacataacagtgaattttattacatatttttatataatgaaagaccacttaaacggaaaacgatagtagatacgagattgaaagaggttttgtttttggtgacgttatttttaacaaatgtgctgctcggtctttcgattgccctccccgttggcacggtgacgattgaaatgacaaagcaaggtttaaaaaacgggtttcttcacggttgggttgtcggactcgggggcatgacggttgatttattactaattgtacttctttactctggactggcttcttttttatcggctccttttatacagcttatcatgtggcttataggagcgctttttttactttatattggctatgacagcattaaacatgccgaccatgatataacggctcctggagagcacataaaaaagtcatttgcctcttcttatgtgaacgggatctttgttgcgatttctcctagcaatctcattttttggctcagcgtgtttggaacggtgctgaccaattcgcttcaatcctctcattcttttcatttcttgctgattgctgccggaatattaacagggattttaattcatgacctaggcttaatgacgattgtctccggaactagaaaagtgctgaatcagctttatattaaatgggtttctgttgcggcaggatgtatcttaatcggtttttcatgctatttcctctaccggtttattgggaatctgggcatgtatttttaatatgacgtgctatatcccctctttatctagtatagagagggaatttttatcatctatcagggactatcagacaaaaagttcacaatttcgtcacatttctattgatttttttctctttttatacgaaaatataaaaaagggaggaaatatcatgaaaatcaaaaaagcacttcgcatctttattggatcaaacgtccttgtattattaacatttggccttcttccagcactattagttaaccctgatattgacctaattcaatcatttattaattatataggcaaggattaatcctgcttaaaataatctaaattttcaatctattattttataaaaaaagacagcgcaggctgtcttttttagtaggtttacacgtttatttagttgaaaacagctttttaacatccattttttgatctttaacaatcgtatatgtcgcctgttttttatcttcaaagctaaacgcttttatgtagtcattatcgtaaatcgttaagccgtacgcgtcttttccattttcgacgatttttatccagtaagcctggtcaaacttttggtcgagctccttgcttttttttacttctacctgtgacaaagagtgtacgatctcttttatattctttttatcgtctactacacgctttccttcgtctgtatctatttcaatacgcgtaacgtttgcttcatctacttttatgacgtcttttaactgatgggctttcccggtatatgtaaaataaaatacgacgataaataaaagtgcagctataataatcgttctttttttcaaaaggaacctccttttctacatcacgctgcattcacgtgatacacctttttattcctcctgttccgcagccctttagtagaatgctgcttcctacaagtaaactatacgttaatcccggaacaggaagtactaacgttaccatcaacagtaacatgcccgtacttgtaagagctactccggcagctcgatttttcattcctttcaccaccgttgctctgtaaatctctttttataaagtgatagaaataatattgatctactatttacttatgtgcttttagcttatagtacagaaatgtcaaaacttctactagtaagatcactacttcacattaccttctctttttaactaactcatcatgatttatgaaataaaaacagctcatctactgttgctcccaactcctcagccagctgaaaagctagcgttaagcttggatcatacttattgttttcaattgcattaatcgtttgtctcgatacgccgcatacttttgccagttcgtcttgagacatctttttgcttttacgcagttctttaattcgattttccaccattcatcactcatctctaaaatgtaaaaaactttttacatccatatcttatattatttcctttgttactgtcaaatatgtttgacaaaatagagtcttttacataactgaaatagaggttggaacaaaaataggttagttgaaggacaatgcgaacgagtttgattaagaattcacctcgcactaatttttttataggtatggtgaacataggcttcgtgtatgcaggtgcttctagctgatgattggagggcaaagcgaagactcctgcggggaaagcggaacaggtaagaccccacaggagcgcaagcgacgaggaggctcagcggccgcccgcggaaagcgaagccttgcacggaaatcattagcggtgcaagaagcaattcatagtagtaacattaaagcttcttactcatattaaaccacttgacgcctgcatgctgagactccgcaactccttgattcacatatccgttcttttcgtaaaaaggaatcaattcttctttacatgttaacgtaaccgttaagcgctgtttgttctgcgcttgtttttcaaactcccttagtagcatactggcaattcctttgtgatgatgctttggatttacaacgatacctaaaatactttgataaccgcctgtctcagggttcgaaatcgttttttcaaacaaatcatccgtaataaacggtgctgaaatgacgggaccgttcacatatccgattatttcttcattttcttgggcgatgataaacgtatcaggaatggtgttaatccgcgtgataaatgcatcttttgaggcagcttcttcgggtgtaaagcctttgttttctaacgtaattaattggtttaaatcttttttatccacttgtcttataatcattggaacgtttcctttcattatgtatttctcttttttctctaaaagcttctattacatataactatctctttctactatatataaaaatgcccaaacaaaaaaggattgacctctgcagcatacagaattcaatcctacttcgctttttaattaacgtcttgattatttgataaatgcaccaaacggcttgcccaccggaagcacaactcgaccgtagtgagtatttaatacagccgctgcagatccatagaatgaaaacagagcaatcaatagctctgacactgccgctagtaagtgcgtgtattcatatgccacaccaaatgtacttagcgataatccaataaataagaaatcaatcaacacaaaaataataaataatactttatgagtgcccattgcgccaactgtcataaaaacgctgaaaattaagtagccgacaaaagcaaatgcgagctgcttcggatccgcttcttttgcgagcgcttccccaaatgctccaagctgaataagccatgtcatagctacacctagccaaaataatccgaaggcaccaaaagccgttgcgccgaaggtattattatgtttgaaatcttgcatagacgcgattagctgccctatcccgcctaaaaaaattgcccatggcaataccaatgaaacaccatcggttaccccaagcttttgaaacgatgcaacaagtgtcaccatggcaagtccgaataggcctagcgctgatggatctgctgttacaattttaacgtgctgcgtactgttgttactcatgttttacctccctgattttaaaaacacctttaaaaagatacaaaaatctacgggaagtgtcaatggatatttttggcctttaaaaaacccataagaccaagcagtgtagcgtttacactgcttgatctttactttcttgttattaaacgttttgtaataaattttgtcttgtttgttttgcagactcaaccatcacttttaaagcttcaaccgtctcgctgattcctcttgttttaaggccgcagtcgggattaatccaaaataatgcaggatcaagcacctttagagcgcggtcaatgtttcgtgtcagctcttcaagcttcggcacgcgcggactgtggatatcatatacgccaagtccaattccttgattgtacgtatgttcttcaaacgcataaattaattcaccgtggcttttagacgtttcaatggaaatgacgtcggcatcaagcgctttgatcgcatcaataatctcttcgaattctgaatagcacatatgcgtgtgaatttgcgtctcgttttgcaccgataccgtcgctagcttgaaggcatacaccgcagcatttaagtagctgttccagttttctcgttttaacggcaatccttcacgcagcgccggttcatctacttgaatcattgaaatgccccgactttcaagtgcttctacttcttttctaagagcaagcgcaatttgatttgcgacgtcgtagcgcgggatatcatcacgcacaaacgaccagtttaaaatcgtaatcggacccgtcagcattcctttaaccggcttatcggttagagattgtgcgtagatcgtttcttttatcgtcatcgcctgttcgtacgagacatctccgtaaataagcggcggtttcacgcagcgagaaccgtaagattgcacccagccaaacttcgtaaactgaaagcctcctaatttttcaccgaagtactcaaccatgtccgtacgctcaaactctccgtgcacaagtacatctaagccgatattttcttgaatttcaatccattttttgatttcctcgttaatgtacgcttcatatgcttcgtctgttagttctcctttacgccattttagacgctcttttcgcacttcttttgtttgcggaaagcttccaatcgttgtcgttggaagaagcggcagctgaaacgcttcttgctgaacgcgttgacgtacgtcaaacggcgcttggcgctctgctttataactgtgcagctgcttcagctctttttgcacgtcttgatgatttcgaaaagatgatccatttaatgcttgaatcgcttgtttgcttacacttatttctttttctattgcttcttttccttgctgtaccgctttcgttaacagcgtgatttccttcagcttttcatctgcaaaagagagcgcatttttcaatactggatcaatcgtctcttcattttttaccgtgacaggaacatgtaatagacttgatgaaggctgcagaatcaaacggtcttttgatacggcttcttcaatttcactaagcgttaaaagttgttcatccaatttttcacgccaaatgtttcgtccgtcaatcactcctgctgccagcactttatcagttggaaaaccatatttattaagcgccgtgagattttcgcctcggtcatgtacaaaatctaagccaataccacgaacaggaagagcaactacttctttatagtgattaacgctgtcaaaatacgtttgcaaaataacttttacattcggtgccgcttccttcaaagtttgatagacttctctgtacagcgcgatttcttcttttgatagcgttgtagctaaaaccggctcatctatctgcacccactcgacgccttctgcctgcagctccgctaaaatagttgcataaagcggaacaaattgttcaactactttttcaaattcactttctttatatccttttgacagcttcacaaatgttactggacctaaaataacgggtttacctttgatattcagcttttcttttgcttctttgtaaaattgaagcggtcgattttctacaagtgccggcgtacattcctcaagctcgggtacgatgtagtgataatttgtgttaaaccattttgtcatcgtagaagctaccgcaccttttgttcctcgcgcgatgtcaaaatacgtttcaagcgataccggtcctccgtcatattcaaagcgctttggcaccaaaccaaacatagcgactgtatctaacacgtgatcgtataagctaaaatcgccgactggaatcagttcaattcctgcgtcacgctgttttttcagatgctcaagacgaagagcttcaatttcctgtagaaagatatctttctctagttttcctgcccaaaactgctcaagcgcttttttccattctcgtttttcaccaattcttggataacctacatttgaactttttacactgctcattttttccactccctgtatatttttttatcgataaactaaaaaatctctcttttcgaaatgaaaagagagatgatacgcatacttaactaaagttgagatagtctgtttttctcaacacgtattcctcactcctctctatatcccgtagagcttaagtgcatacaacaggcaggtctcctgacttaggttcatcgcttcttatcccttcccatttcaacatgaaacagtggttaataagttgctccccattacagtggcgggaccgcgccggcttttcaccgatcttcccttttaagctgcgtacattcgttacacagcacctgatgcatttttataaaattgttcattcaaaacaccttcacataaaataaaaagcctctctatcatgaatagagaggcatagtatctatgaaatcctctcttatttttcaaagctgtacgctttgcaggatgtagcacctttttaacaagaatgttaaatggttgccgggcttcacagggccagtccctccgcctctctcaataagagttttaattgtttataatattttgaatgtagagccatcttaacaccttagatttatgctgtcaaaagaaattgcaaaaaaattagttttcaggaggtgctgacgctaatttttgtcttaacaatttgtaatcgtcttttcgatgtgtttcgatcaagtcttttgctccttggtgatatcctgacgaataaatgtactctactgctgtttcaataagctttcttttttcttcggcacactcccggtccattaaggggaacagtctacctaaaaggtcatttaaatcttccttgataaaacgattaagtccttcttgcatcttttcgtttgccatgattgctcctccatttgctgtgtatattctaagcctctataaacaggcagttcactgtgaattttaagataaagttaagtcattaaacagtatatcaagtgaatgtttttctttaattacatatgtaatacaaatatatgacaaatatagagaatatatcatcattcattatctattataacgtttgactgaaccttctgctacaaggtttcgttaagagttatgcacattttcccaaaagaggttgagacataacgaaatgaattcaatctaaaggcaaatgggatacatgagctgaatcgcttgtgacaccgcagttgatttccgtacaagacttcgcttcccgcaggagtcttcgtcttgtcctccaatcacctgctagaaagatctatacacatgaaacctacgtttaccctaacaaaaaaaacgaaccactaatcaaacatcttgatcaatggttcgtttttcatttcgtctaaaacccttttgtcccagcctctttttttgaacctagctttctactttcttgtttttacaaacaatttcttcgaggtcgtccaaaatccttccaaagaagaggacctaaaatgtcgtacctgcttacaaaaaactctgtaaaattataattatttaaaattaaaggcggctcaaaatcaaggggagcaccggcgcctcctgacaatacaaaatcagtgcctcttccaagcgtaaacgacccgtttctgttttttctaataaactgctcgtcatacgcatgcacgtggctgactaacactttttttacgcggtgttcttgaattaaatcaaaaaattcttgactttgaggagtcgttacaggaaacccttcaagatttgaccaccggccaatatttggctgcgcatgcatggctacaacggtattacgaggagcatcctctagctgctgctctaaataattcagctctctatctgtaaatccatatattttattcttgggactgatgacattatttagtgcgatgcaccggaagttgaagacaggaatatcgataacccagtgtacttttccgatagtggctctgaagttttcgagattgctttcatcaaggtacagttcatcatgattccctacgcatacaaacataggaatgtttggtgcgattttttcaacaaccttaacaaagtgctccaaatattcttttttccctgtatagacggtgtctcccccatgaataataaacagcgggttcaattccaccgccttttttaatacaagctcaaattcaccgctcatcgtgaaacaattatcgtttggtccgtcacctctgctgtctcccataaaaacaaagttaaatggatctctcggatttaattgtttaattctttgctttaatatcttttcagaacgttcatgaagcgtcaaattcatcaactagttaatccccctattaataaataaatttagttaaaagtaaacaagcttacttatttatatgagaatttgttgatggtggtcactaccttcttgtaagcagaacgcacatttaaattagtttccatagcctatctatcctttcattttgttaagcactgataggacaacataaaagctagaatcctactaatctaaaaaaagaaccccttgttgagatagcaaagggttcttacaattagagcgttcaccataatcaaacgtacttattatgttcaactggacttaaagacttccttgcagaccgagctgccatgtccgtttcaatttgctctaggctacgtccttttgtttcaacaactacaaaacgtatgaagaataatcctagaatacaaatgatcccgaacgttgaaaagataacgcccaaactaaactgatcagctaagatagggaacacaagccctactgccagcgatcctgtccagttaaaagcagatgaaatcccagcaccgattccgcgtacagaaagcgggaaaatttctcctacaatgatccacgtaagcggcgcccaagaaaacgcatagcaaaggataaagcagcaaagagcaattaacgtaacccagttcacgacgacttcattaacgcctaatgctcctagaatagccggtgtgaaaaatgaaagagccattcccgcaccgccaatcgtaagaatggtacggcggttgaatttatcaacaaactgcaggaagataagtgttgtcaccacaaaaatcaccccaacaataaccgtaaagccagcagctacctgcggggctaaaccaacttgacgagcaatgcttgttgcataataaacaattgagtttgagccttgaatctgttgaaaagttgccattccgacaccgataattaaagctaaacgaaactttttatgaaacagctgcttaatgcctgattgttcatgaacagctacgctttcaatttcagacacttcagcttccacttcagctgttgaccggcgaagcgtgcgcagcacttcacgcgctttatctggcattccatttttaattaagtagcgaggcgactctggaagcttgatcataccgatgcataatacaattgcaaaaataccggcgctgccaagcattaatcgccagctgtttggaaccggctcaaaaataaaggctacgatatagcttaataataatccaattacaatcattagctgatttaaacctgaaagcttcccgcgaatattagcaggtgcgatttctgacatataggcaggaactaacgaagaagccgttcctactgctgtacctaaaaagacgcgcgcaatcgttaacgtaatttcctctggtgcaatcgctgaaccgatggagcctaaaagaaagatgatcgacgaaattaaaattaactttcttcgtccaaacttatcgcctaataatccgcttaaaatggaaccgataattgctcctcccattagcgatgaaaccacaattcccagccagagcggacttaaatgaaacgcttcacggatatgaccttctgcaccagcaataatcccaatatcataaccgaataaaataccggcaaatgagccgaagaagaagataaacttacttgatactttactcatgattatagatcccctttgtattgtcttagttttgcttcctatcacacaaatttaaaacgctttcatttatttctaaaaacggcgttcttttactaagttgcgctatattttcactttcaaggaagcagcgctccctcgaaagtagtgatgcttacttaataatgacgtactctagatcaacaagctttgcatagctcacgatttgatccgtcgttaaatttaatgaaagaaccgtatgatggcctcctccgttttcaatccacgctttaacgccgtcttggaagttcggcttaatgttccaaagcacgcgcgctaccggaagatttggagcaggaacttccggctcaaatgccgatacttcgttaattaacagcttgtaatgcgtaccgaagtcagccatggaaaccactacaccttctccttgtttaccgtcaaacactaagcgggccggatcttcgcggttaccgatacctagcggagaaacgattagttttggtttgtttaccgctagcgtcgggtctacttcaagcatgtgtgattgaagcacagactcacgtccgggagccaattcatacgtatagtcttccataaagcccgttgactgattgtggctcattactttaagcaggcggtcaagcgccgctgttttccagtctccttcaccggcaaagccgtagccctgtgccatcaagcgctgtacagctagaccagggagctgtttcataccgtatagatcttcaaaattagtggtaaaggcgctgtagccgccttcatctagaaaacgtttaatcgcaatttcatagcttgcctgtacttttacgctagactcccagtcttctgcagaataaccgccgtaaacaaattcgtacgcgtcggcatattcagcaaataaatcattgatttcttcttccgtaacggcattgacatattgaacaagatcaccgattccgaagtagtcaaccgtccagccaaattgaatttgtgcttcaattttgtctccttccgttacgccgacattgcgcatattgtcaccgaaacgcgcaactttaatgttgaagctttcgttataagcagcggctacgtccatccactgtgcaatttgctgctgtacttcggggcgctcccagtagcctactacgattttattttgcttgttcaaacgcgcgttgataaagccatattcacgatcaccgtgagcggactgattcaagttcataaaatccatatcaatcgtttcccaaggaatgctttcgttaaattgtgtcgccaaatgaagcagcggtttttgcagtagtttggtgccgcgaatccacatttttgcaggcgagaacgtatgcatccacgtgatcacaccggcaacttcatctcggtaattcacttctttcatcatgtttgtaatcgtatcagcactcacagctaaatcttgcagcacaatcggataaggcaagacaccgctttcatttaaagcatcagtcattgtttgcgcgtgtgcttttacttctgctaatgcttcttttccgtaaagatgctgtgaaccaacaataaaccaaaattctttttgagctgtttttaacatgataatccccttttctgtatgtaagtcttttactgtccttgcccgtaatacgcgttttttccgtgttttcgtaaataatgtttgtctaatatgcgctgcggcagctcttcagccagcccgtttaatttttgtgtaaagaagttcattttggatacttcgtctaatacgacgctgttcatcaccgctgatttggcatcttttccccacgtaaacggcccgtgcccttgaagtaaaataccaggaaccgctaacacatctaagtcgcgctcttcaaatgtttcaatgatcaccttgcccgtttccacttcatatccgtcattcacttctttttcggtcaaaaagcgcgcgcacggtacggaaccataaaaggtatcggcatgcgtcgttcccattggctgcacatcaagccctgcttgagcccaaatcgtcgcccacgttgaatgcgtatgggcaataccgccaatttgtgggtaatgtttatagagtacggcatgcgtcagcgtatcagatgacgggttaagctcaccttctaccacgcgcccctctaggtctacgactaccatgtctttggccgtcattttctcgtacgtcacaccgcttggtttaatcacaaacaaaccgctgtctcgatcaatggcacttacatttccccacgtgtacttgaccagtccgtgttttggcaaatcgacgtttgcttgaaatacttcttcttttaatttatctagcacaataactcctcccgttcttcgctgtggtgctctgcagctgctttttcaatcactagcccttttttatatcttttaataaatgcttcaaatccttttacatcgagttcgtcaggataaatctcttgtgcggtcacttctttaaagactttatcatccaagaaatcttctaaactttcattctcacttttattgagcatataagaagaaaggatagccattccccacgcgccgccttctcctgctgtgtccatgacggaaacaggcgtgttgattgccgctgccatcattttttgaccaactaccggcgttttaaataatcctccgtgcgctaaaatgctgtgaatctttacgttttcttctttgactaaaagatccatccctatttttaaagcgccaaaagctgtaaaaagatgtgtacgcataaagtttgctagattaaaattgctttttgctgaacggacaaatagcggacggccactttctactccggtaatattttcacctgagaaatagccgtagcttagcaagccccctccatcaggatcagcttctagcgctttatttaacattacttgaaataatttatccgactctactttttgccccatcgcctccgaaaattcgcgaaacaatccgagccaggcgtttaagtcgcttgagcagttattcgcatgaaccatggcaactggactgccgttgggcgtggtaaccaaatcaatttccggataaacgtttaaaagctttttatctagtacaatcatcgcaaaaacggacgttcctactgaaacatttcccgtgcgttttcttacgctgtttgtcgccaccattcccgttcccgcatctccttctggaggacaaaacggaatgcccggctgcaaattttttgattgatctaaaatgctggctcctatcgctgttaatgtacctgcttgctcgcctgaagtatgaactgcaggcagaatatctgatagttgccatggatatcctttgtcagaaataagctcattaaactgcttcatcataccttcactgtaattttgcgtacgttcatcaattgggaacatccctgaagcgtctccaatgccaagcgccttactgcctgtcagcagccagtgaatatagccggctagcgttgtcatgtaatcaatgcgcggcagatgtttttcttgattgatgattgcctgatacagatgcgcaatgctccatcgttcaggaatattaaattggaaatgttcagttaattcttttgctgctgcgcttgttgttgcattacgccacgttcgaaacggaactagcagctcacccgttttatcaaacgccatatatccgtgcatcatagctgaaacgccgatggagccaactgttcgaatggtgatcccgtagcttcgttccacttcttgcttcatttcacggtaagcactttgcagacctgtaataatatcgagtaagttgtacgtccaaaaaccgtcttctaagagattttcccattcataactgcctgatgcgatcgtttcaaagttttcatcgatcagcaacgctttaatacgagtagatccaagttcaattccaagggatgttttccctttagcaattgcttgttttatgctttcttgagttgttttcacgtttaatctcctttctgatagctataacaatacctatagcagtaaggaagcgctttccgttttatgtaacactgtttgaatttgttaacaacttaagtatatttatttgtacgtacatttgtcaatataaaaattatatatgcacacaaatacttaaaacaccctactattcctttcttaaacttttaaaaaatcggtattcaacccttaaatcattttcctttcgattaaaaatcaaggaaatcttttcatttattcacgttcatgataaaatatgtccatacaaattttatacataaaaaaagttgaatgtatacaactacgaaagaagtgaaaacatgaagccaaaatatcaggtgattattgaggatataaaaagcaaaattctttcaggcgattacagcatgggcgaacaaatcccgactgaatcggtcatgcaagaaacgtatggtgtcagcagacatacggttcgaaaagccattttagagctgtcgaatgaaggatttttaagaagcgaaaaaggatctggcacctatgtaagcaatcagtatcaatccaaatctagcggggcttctgccaacaaaacaatcggtgtaattaccacgtatatttccgactatattttcccttctattattcgcggaattgaaagcagattaaataaagataattattcgctgctgctggcaagcacgaataacgatgtggaacaagaaaaaaaagcgctggaaatgatgctttcctacggagtagacggtctaattgttgagcctacaaaaagtaatttgtacaatccaaacatctcttattatttatcattcaaagaacaagacgttccgtttacgatgattaacgcctactacgaagaattggacgttccgtttttttgtctagacgacgttcagtcaagctaccttgccacaaacgaattaatttcaaaaggacatactcaaatcgggctcatcgcaaaaatggatgacctgcagggaaagtaccgaatgaaaggctacataaaagcgctcggtgatgcaaaactccgctttcagcctgagcatattctgtcttttaacaccgaaacaaagcttgatttgtacgctaatttaaaagagtttctcactgaaaacaaagacgagatgacggctcttgtctgctataatgatgaagtcggattagaagttgtaaatgtatgcagacagcttggtatgtccattccggacaagttgtcaattattggtcaagacaattcgtacatcgctaaaaatgcgacgattaatttaacaacgctaacacacccgcaagaacaaatgggacacgacgcggcagattggatcattaaaaagctgcagggcaaaaaagatttgccaaacgaaacctactatcagccggtgttagttgaaggtgaaacgattaaagagttaaatgcgaagcgtgatgaagttcgttaaaagaaggctcccttagaggtctataaaacttcttatgagagaaagggatgcacattattatgcatccctttctttatgtactaattccctttataacggagcctgaatgttgagatatactcctttttcgatcttttgttttgcttgttctattagtcttttagcaataagtgatagctgagatacagaattcgccccatttgaactaataacaagagggtcaacccagcgcatttttgtcgtttggtgaacatcataacaagaagcagtgcctttttgtactttgctgttaaaaagagcagataacatcccttcaacgctgctatctccagcgtttttcagcagccaaaccacatcgtcatcctgctttaaaaaatcttcgatagataaaatatctttttgcaaagcgagcttgatagtttccgtcagctgatgatttccaaacatattaagcggattcataaaaaagccaatcacttctttgtagtaagcatccacaaaccactctgccgctgataaattactgcacgccatttgtccattaaatacgacaagctgatccaaaaacgcatgcacttcttgtaaagtaatctccccgcatacgtacaaatcccgcagcgtataatccacgcggtcagcgcataagtgcggagcttgctgttcgagcagcgtccactggctttcatcgagtaagatctctcgccagtttaaaccggcgctttttaaaatagaaggaatagacgactgagtcacaatttgttcgtaaatcatttcatgataattttcttctttttgtcccaaaacatagtcaatcacatgagaaaatgccgtatgtgaaacgtcatgtaataaagccgctatttgctcttccaaagagcctccgagtctatttacaagcatcatcgcaccaatggaatgatcatatcgagtagtattccagttttcatttacaaaccggctcgctccgccttggtaaattccttttaaacgctgtacaggatcactttgaatgagttctaaaagaacgccgtctgcttcaaatttcccgtacagctcatcataaagtatgagcatatttctctctccttttactaactattttggacttattttaatctaacttgagacatcgcagggttccatttgcctgtaactaaaaacgacctcgtcttaccagaggtcgttttttattattcacttgacgctttaattcgatcaaaatactgctttgcaggaagcaaaccaagatttttttctttccgtatatatttaataacatcaacgtctcttctgccatttcgaatcaaaagattgactttattttcaaaagtctcgtctttctctatttctagctgcttccactcttcatctaaatcacgtttaggtgttttgagcaggaatatcactagtataacaagaacgctacttgtggtgatataaagccaaagccaatcgagaaaccagctgttaatcacattcactatgatgagaatggtgaaacaagagtatagccttgtttgatacttattagctttttttgaatctattttattaaaaaatatccccaccgtcagcctccttttagcatttcattggcgcttttttctattaatctctttttgtgcatgaagcaaatctatatcatacaaattaccatttaacctaacaaatagcaatcaagttcaccctatcatactctttatctcattgactactcataaaaaatacagggctcttttcaaagccctgcacttttatttcatatttaaataaggttaaacgcttttaccacttgagcaaccgtaaacgtaacgccaatcgcaatcactgttggaatcgcaaaagcaagaaacgtccattttgcatttttggtttctgtataaatattcacaagcgtcgttccgcacggaaaatgcagaagcgaaaacaacatcatgttaagagccgttagccacgtccagtggtgatcaaggaaaatttgtttcagtcgagtcgcatcttcaatttcaattaatgaacccgttgataaatacgccattaatagaacaggtaccacaatttcattagccggcaagccaatgataaaagcagctaatatataaccgtctagtcctagcgatttagcaaacggatcaagaaactgaacaaaatgcattaaaatactcgtatcaccgatatagatgttggccagtacccacgttaacaccgctgcgggtgctgcaacaataatcgcgcgttttaacacgaacagcgatttatcgagcgtcgcgcgcacaattgtatcaacaaatttcggcttgcggtaaggcggaagctctagcgtatagtgagttggaactccgcgcagtgccgttttagacagtgcccacgatacaaacagcgtcaccacaattccaaataacactgttccgactacaacaagcgccgttacgaaagttttagcactccctgtaaagccggtcgccataaataaagaagctaataaaatcagcgtaggccatctgccgttacatggaacaaaattatttgttaaaatcgccatcatacgttcacgaggcgattcaataatacgagtcgacataatcgccgcggcgttacatccaaatcccatcgccatcgttagtgactgctttccgtgtgcacctgctcgtttgaacaaacgatccatattaaacgcgacgcgaggcaagtagccgtagttttctaaaagggcaaataccgggaaaaagatggccattggaggcagcatgacactaatgacccatcctgtacctcgaaacagccctagtacaagaattccgtgcagccattccggcgcatgcatcgcttgaaagaaagctgttaagtacccttccgcccagccaaaaccttgtgcgattaatccagaaggaacatttgcgccggctatggtgatataaaaaattacggataaaataccaagcataattggaaatccccaaattggcgaggtaaagactttatctagcttttctgtgcgctgaagctttgagcggtcttcgtacacaactgattttttacatatttgctgtgacgactgataaatgcttgccaccatatttgaacgatgatctttttcttttgcctgctgggcatagcgcgttaattgttccattgctaatgagttttcaggaattaacggatttcccatatgcgctgttcctcctttctgtgtgactgatgtcttgctgctgacgcagctgaatcgtttctaaaaatgacgtatctccatcaagaacccgtaaagcaatccagcgcaaaggaaattgatttccaacaatagaagcgacttgaggttctagctcctttagtgacgcttcaatttcttttgtgtactgtacctggtaagggttaagttttacctgccctcgcacgactccttcaattgcatcgagcaaatttataattccttttctattacgtgctgatataggcacaaccggtacgcctaacgattcagcgagctttttttcgttaatcacaattccttttttctttgcttcatccattaagttcacgcaaatcacgacgttttcagtcatttccatcacttgcagcgctaaattaagatttcgctccatcgccgttgcatcgaccaccacaaccgtaacgtcaggtctttcaaataaaatatagtcacgcgctacttcttcatctgccgaatttgaatacagtgaatacgttccaggcaaatcgacaattgtgtagagctgctggtggtgttcaaacgtcccttctgctttggctaccgtttttcccgtccagtttcccgtgtgttgcttaagaccggtcaagctattaaataacgtactttttcctgtgttcggatttcctgctagtgcaatacgatacttactcatcgtcatcacctactttttttacataaatttttgagctctcttcttttctgagaccaatcgttgtatgactgacttgataagcaacaggatctcctaacgggcttttttgaagcactttgataattgctcctggaataaatcctaaatctaacaagcgtcgctttaaggcaccttcgatttcgattcgctctagctgtaccgtttcacctgtcgtaaatgtagacaatggataattatttacactagccatctatttttcgtcccttcttattttttacctaaggttatgtttttttcattagaccaacttttaaggtaaaaaaaatatgctcgttgatttttaatagggtattctgctggtgcagaaaaatgaacatgtcagcataatttatttaaaattttcagtttttacttgttatgataccaaaagtttaccacaggaaacttttttagtctagggtaaaatactgtgttttttcttatttctactgaaggcataaagtgcgctggtctattttatttaatcatttaataagaggaatcaagtcgaaaaataatttagtaaaaacgaattgataaaaataaaaaactgtaaaaatatgctatactagtgaatgggtttttttgaaaataaagtattgattagctttaaaacctcaaaaaatcactttaggaggcttttatgaaaaggttcaaaagagttagcgcagttgttttaggtttggctttgttattcacgccgcttgctccgcaaacagttgcagaagcaaaagtcgtgtgggggaatcaggagctggttaaagggcaaataggacgcgttaccgttttaaagaacactaatctttacaacattaaaaacaacaagttagtagcggctagaaaagtgacaaaagggcaagtattccgcgtgtattctgagtccagcaaatttggtggtctgtatggggtatcaaagggcacctatgctcaaaagtcatcaagtattaagtatgaaaaagcgcctagtgacaaaattcaagcactaggaggaacggttacaaagaaatctttagcaagcaacattagctatccgcaggtatctggccttatcaataaaccatttgaagctagctataatcgaaaatttttaaatattgcaaaagaagcacaaaaagaacacaacgagctaaaagaacaagaaaaggaagaccgcaaaaacggctgggcaccaggtccttattctcgtaatatgacatactctgtaccttacaaccaagataatattttaagtgttgctattacgaatgatgcgtacgctggcggcgctcacggcaacgcttggattgatacttataattacgatttgttgaaagctcgacaaattagcttaaaagatattattaacaacaacactaagttgaataaagttaataactatattcgtaatgaaatgattgctcgcaataaaaaaggtgctcagttctgggttaatgaatttaagtctgtaaacttaaaagaagatcagttttactacacaagtagcggcattgccattatatttggtgagtatgagtacggcccgtattctaatggcattcatacgtttaaaattccgtctagcgtttataaataagattgtcttataaaacaaaaaagaagcctgcgaaccatcagttcataagcttctttttctttttttctgcagaataagcggagcaaaaaagaaaggttatccctaatctccttcccttttaccatcatttttttggatgttgcagaaaatcaaattatacagccatagaagaactcagggctgcctacattacgctgctgatagccgaggaaaactgctttttgaggtatttttatagtgattgaaaaagtgaaatggtcagaactaacgtcagcaaggagcctgcggatgttaacatcattatttttcggttactctgattcttttcaggttttaaaaactcttgaatggctacaaaccagataacaaaagtgattaaagaaagtatccccatagacatacgagcctctccattcatatatgtatttaaatttttaacacatctaattaacaaccaaattaatcgtatctccctgtattgtgtactgtccctttatttctccgataccagtgattaaaagtgaatcacccatttccaatggtttatcctttaataggatgagtaatttatttatattttttaatccatccgcacaataggtaagagatggttgttgaataaggtattcttggttatttatccttacttttatataatttttatgtaataacctgttctcaaaagggacaatattcatcggatcaaaggataaagcaatgatttctccttcgataaaaagatgggttcctatctgtgctgcgaattcatcaagttctttcttccttgattcaattgcaaaatttactgctgcttctgtttccgggcttatttgaacctcttcaattgcctgttttcgaggggcaatatcaagaaatttgattaactcaaatagtgttgttttagtacccaaaaaactttccttccaatcgggtgacaattcatccagcaacaaacacataaataagcctgaactgtaacagctccgccttatattggaagtggattcaacggcgtttattagattttttccatacctttctaaaactaaatcattagcgagcggggatttttctgaaaaagcctttatttcaacgtaccaggcaggtccttcaacagattcaattaagttttcatatgttagatgctcttttattccttctgcccttttttcccttaggctgataaactcgttcaaatactgcttctttttactgatatcagtttctaacaatgcattataaagacttttcctttcgcgatttcgaatttctacattctcttttgttaagggataggttattcccagcatttcatcagggaagcgtttttcctcttttatatactgatttccgtggaataattcgtggatcaatattgaaaaaagtccttcatagtcatcgtacagttccatatcagcaatagccgtaggatagccatcaaatagaataagcgtatttcccacaaactgttctttccattttaaaactttatataacttaagaggatcgttatcatatcgaggatgattgaacaggaatacactgtttttgtcgtataacgcataggcaacaagttcaaaatttggccaatacctttctacgtttgtagtagttaagtctttggaaatttcattcagaaaatgattcattcttttcatcccctatattaaagagtttgttatcctaattttaacataaattttctaatatttagtttatacctaaaaggaaactaaatgtttaaagaattaggcacttttgtgtcaacgataaaagacgttgaaaaaacgcccttataaaaaaagagaatgcgcaaggcattctcttttcacatggctatataagccgctttttcaatcataggttttactctttagacttgcctacctctacttttttcgtaaacattttcatgtcaccgtccaccgtcacgtgagcggtaatcatatattcgccttcttctttaaacgtatagtccgtgctgtatacaccttttccttcgtgcggcgcttttgtcatttcttgattgatatagccttctttttcaacttgaaactgcacgtcatcggcgttttccacttttttatctccttgcgtcacaaggactttaagcttgacttgttcatttgcttgaattgattccggtacttcaatcgttccttttacttcttttgaacttgaatcatttccttttgaacagcctactatagctatcattaaaacaaataatacgatgctgagttttttcattatgttgttctcctttattatgtaaatgtgaagtcttcctgcaatttcatattatactcatttatccggtaaaaagagaaaaaatgcttattgtccacataaagttcttatttctacagtagcttttgcatcttttcatttctctactcgcccttcgctttataaaaaaaactgaagaagctcattgccttctccagctttgcctttatctctgcggttcttctaacgtgtacgatgagagggcgttttctacccatcgtacaaaatccttgcttgctccccaatcaatatttaatatcccttctgcgcttcctgaaggaatacactttactttgtttggaccggacacattttctaaaataatcgttagtgatcctctgccgccggtgcggaaaaaatagcgttcaaacacaagcgtacacatctgcttgccgtctccgagatcataatattccttgtataataagtcactttcggaattatttgcattcacaagcttttttgctccatcaaaaggaagcagcatcgttttaaactcaattactttttgcatcactcaagcccctttctatcgcaacagatatgtactacttctctttttcccactaaaaaacctgccgcttctctttatgtacaatcaatatggtacaatagaagaaaaagaattgtttgaacggaaaaaggagcatacaacctctatgaatacacgagatcaacttatccaaaatgtggtttccacgatgcgaaaccaaacgaaaaaaatgcagctatcggttatccccactttaaaatcatatattcctttaaatgaatttttagcgcttcgcctgctgtataaagaaggcaatcatatcgtttctgagattgcagagcatatgcacatctcaaacagcagcatgacgtgcgtcagcgaccgcctcatggaaagagaatttgtcacgcgcgtacgcagtcaaaaagaccgccgcgttgtctacttatccattacggataaaggaaaagcgtttgcagaagaaatggaaaaagtactcaccaaagaatatggtgaaaagcttagccattttacggatgaagaattacagacgtttcttcgcttgttaaataaaatggatatctaataaaaaaccagatgcacgctaagcaggcatctggtttttattttgttatttgttatttaccttcaaattaaaggcgtctgaagttaaatcttttgaccagtctttttcatgatcacttacatatggaataaatctaagcataataacgtctttatcatttcggtactctccgtccatctctagcaccttgtctgttcctcctccactgccgctttcagaaaggtttcttccattttggtcttttatgtctacaccgacatccgttccgcctcggatgcttccggttgacgatgtaaacgtatagtgtagcttaatcgaaacaggcgatacgcgaacttctttgatggacaatacgccttttattcctttttcgttaatcggaatttctttattcaacggatacacttttgtatcagcgatgatttttgagccgtttacgcttgtatgaaccgtccaatttcctttaatttctccgtaggaatcccggtagttcccgcttttcgtctgagcaggattcttttcaaattctagacttgtgaactgcgcactgatttgatagtttttatttggatcaatatgatctagtacattgtagccttccacatcgattttcccgtcttcgttcgtgtccgcttgcgttagttttaaagcgtacagatagttccagcttccgtctttgtttttgattggttcctttctaatactggaagccgaatcaaaaaacgacatgttgccaattttcacgcgcagctctcccggtcgaattgattcgtctcggttaagccctagtgcagttcttctaaattcatctgcgctgatcgttaatccaagcagcacctgtccgtcatcaagcatcagttcatttacttttacttgaatgccttggtcagtcgccgtttcatttatcatttttttatagctgctcaagctgccttcaggcttgttcataagcagctcgatttgctggccaatttgctgactgattcgcacagccgatgcccataccgtttcgttttgcatcattacaggcgtcacagcaagcagcagcaccgcagcggcgatcagcggacgcgctttttttcgagtcggctttatgtcatgttttaagcgttttttcatacgctttttctcgcttgccgttagctcaatttcttcatattcatcaaaatctacagaagatccatttaataagtcatattgatttttcatctttgtccctccttgtttcttatttaaaaatcgcttttaattttttgcgtccgcgcgatagccggttgtataaattgctgatggtagtctgctgtttttcagcaatttgcttcagctcgacttcctgtaagtaatacgctttaaacagctcacggtctccttcgcttaagtgacctaagagttcttccacgtcgtttgtttgaatgttatgaacttctgacgtttcacccattcccgcttcgctaagcgattcgtgctgcgtttttatgtatttgcgctgatagtcaatggctttgtacttagcaacagctgcaacccaatttttaaacgtatttttctccgaatcaaagcgatcaatatgatgccacaccgctaacaatacgtcgtttacacactcttcctcgtagcttttcagcgtgcctaaatgcttgcgtacaatggccgtaattaatcctccgtactgatcgattaacagctctaatcctttttctttttttcgcgttatacacgcaacaatccagtcatcttccatgacattgctcctttccgcttgcttttacatctattaatacggattctttttacaaaacctatcaatcttcctaaattaaatgaaaaataagcttgttcagtatttctcttgctggtaaaataagctaaaacctttgaaggaggccgctatgattacctatccttttcttacatccaacccaaccatcggcataaccgcaccttcttctggtgtatctcaagctcttcattccatgttttctttatcgtgtgaacgaatgaaagaaaaaggcttttctgttataccgggcgaaaccgtgtggacgcagcataaagcaaaatccacttctcctaaaaaacgtgcaaatgagcttcaagccatgatagaagatagaaacattgatatcattatcccgccttggggaggcgagctgctgattgaaattcttgaacatctagactttacaaaatggacagcaaaatgggtgcttggctattctgacaccagcgttcttttgctggctattacacttaacaccgggattgcaacggctcatggaaccaactttgtggatttgcgcggagaatactgggatccaacgactgcgatgtagcagcaggtgctgacgaccaaaaaaggagaaagcgtggttcaaatttcttctgatcgctatcaaaaagaatggcagcatgacaccccgtcaccatgcgtgtttcatttaaccgaacaaaccgcttggaagcatacagagttaagcgacgtgcacatcgaagggcgtcttctcggaggatgtattgacgtgatcaggcacttagtaggaactccttttggagacgtaaaaacgtttcgagaaaaatacattcctgctgagccggtcatttggtactttgacaactgtgaactcacgaccgctgaccttcgccgttcacttcttcagcttaagctagcgggctggtttgataactgctcaggtattttattcggcagaagcagcgctaatcaacccgttgattcctacaccgctgaagatgtgtatctcgaccttgcttctgacttacatattccagttatctatgacatcgactgcggacacctccctcctcagctcacgcttattaacggcgcgtatgcgagtgttaaggtaaagaaaaataaagggacagttgtccaatactttacgtaaaaaaagaagcttgtataaaagtagtttgattgaaggaagatccgaacgaattggattcttgatggagaatccaattcgttcggattttttatggttatggtgaaagtagatttgtttcatatatgtaggagcttccaatggttgattggagggcaagacgaagactcctgcgggaaaagcggaacaagtgagaccccgcaggagcgtttgcgacgaggaggctcaccggccgcccgcggaaagcgaagtcttgcacggaaatcaacagcggttcatttcgttatgtctcaaccttgttttacatatctctcatcaacactaaaaacgaagcaaacatgaaaaaggttgctccaagccacgagtgatagtactctttttgatttctttcaaacttccattcttcgaaacctcgaaacacgtacaggagaaacaagaaaagaaacataaaaacggatgtgtaggctggaggcataacaaagatcagcactaaaaacgaagcaagcagcaccatttcaatggtgataaacagcggacgccttcctttaaagcttctccaatagctttttttcatctttgtatgcagcttttttcgcatgacaagatccagaaagatataaacgactgccaaaatcagcaaatacacaagcgtcattttcactcctccttccggctaaaaatatccttatacttccattttaaagaacttcccacaaatttcaagcgtctaaaaaatctttacacaacttatgagtgcaagcattcatatatttaaaaatcgctaatatattgactaatgtacaggttaaattctctgtataaactcatctagagggggacatcaagttatgagaataaaagaagtaaagcaaggtgcactcgcagcgctgaaaaaccgctggggatttgccgtactgcttacgttcgttacgtatttaatcgctgccggtattccaggacttattgactttttaatcaacggatttccaagcgggtccgaaaccgaatactctcagtctaccttagctaatattgtatccctgctgctcgtaccgctctttttctcttactactgggtactattgcgtctggttcgaggagaaagtgtacgtgtaggaaatgtgtttgattcgttttcatctgcgggactatattttagaacactcggactttacttactaacgattatttataccgtgctatggagtattttattaatcattcctggcatcatcaaaagtcttgcctattcacaggcttactacgtattccgcgataaccccgattattcggtgaaccaatctattactgaaagcagacggttaatgaacggctacaagtggacctactttttactccttttaagctttatcagctggggcattttaagtatcatcacgcttggcattgggttattatggctcgttccgtacgtaacaacttcgcttggtgtgttttatgaaaagctaaaagcaaatgaaactgaagtagctgaataaacgaaaaaccgtattcgagttgcgaatacggttttttatttaggtttggtattctctccatgtacattagttgaaatttgccccgttattcactaagttcgatacaaactatgttactatcgaactatatactctagaaacagcagctatttagctgttgtttttttattcccctctcctttttcaacaaaaaaatagaaaaattccatcctccttacatattttctaataaatctatgaatctcctaaacatttctacctagataaattgtcagaattattacagagaaggtgacaattctacttatatcgccttttaatattaaaactatgttacaaaatgtcgtaatttggaattagatgtttacttttcctgtcaggattgatagactcacagttgtgaataaaacaagttatggaaagggagaaagaacatgctaaagaaagcaaatcgtacagttatgaatatggggttagcagcattacttgttcccgctgccctaacatttagcacaacttcagcaagtgcaaatgacggaggcgctgcaccagcacccgtacaagaaaaggtaacgccaagcgtacctcaacaacaagcaactactactactaatcaaaaagtcatcgtaaacgtgagtgcgttaaatattcgtcaaggagctagcttttcatctccagtcgttggaactgcaacacaaggtcaagagtttgctattttaaaagaagcaaacggcttagttgaaattgcaccaaacaaatggatttcaaaaagctcaagctacgtaacaattgcatcaggtaaaccaagcgcaagccaagtaaaaggtgtaagcacatcaactccttctacctctacagcatctacatctgcagcacaagaaacaagcacaccagcacctgctccaacaacaagcacggcttctggaagcacagtaaatgttgcacgtagtttagtaggatcaccttaccaatgggcaggaaacacaccaagcggatttgactgctcaggctttatcgcatacgtgttcaatcatagcggtcacagcatttcacgtacaagcgtagccaactactggaacatggcgacaaaaatttcgtctccacaaccaggagatctagtattcttccaaaacacatacacaagcggcccatctcatatgggaatctacatcggaaacggccaaatgattcatgctggttcacacggtgtagcagtagctgacctagatgtttcttattatcaagatcatttcttaggatacggacgcttctaagaaaaaaatgccctctaatcgttagatacgttctaacgattagagggcatttactttttatcgctgcgctactgaaagcgccttttcaatccgcgtttgaaatttatttttccagtcttcagctagctcagccacttctaaagcccgcttcatcccttctacatcttttgaacgatggaaatataaatcaagcgtaaaccacacggatacttgatctggatgagcttgaattaacttcacttccgcatcttgcgtaatcgtaccttcttttaacacgcggcaaagatagcccgtatagcttgtctcaatcattcgttttaaaattcctttaacgcccgttctttttgtaatcgtgtcgcatggatttcgtccttgcgtcacttgaataacggcgtcccctacttgataaacgtctccaatgcatacgtctttttcaagcatgcctgatagcacaagattttctccaaacgcagacattggcagctccgtatcaaactcttcgttccatttttggtagtgttcatacggatacacgcacaccgcacgatcccgtccgccgtgataccttaagtccgctacgccgtcgccttgaaatccttctttggctaaaaacgtttcgtctacttgcttcttgcatatgcctgtacgtatttctttgccgggactgtatgccatttgttcaggcatgccggttgctaaatgaattattttacgttgattcatttgtatctctcccttccccgttttcccttactaattacgtcatattttaccacattttaaagatagatctcttatttttcgtatattccactaaaatcttggcaatatcatgaaagtttaaaaaatatttcacaattatattaaaaatatcttcatttcctctttttcttttgttcgaaatgatttaagatagtagaggctgtcgaaatataagttattatgtcagctctgcatgtttttttacatattagcacatagtaaatattattttacaattacgtcatttttttaatggcctaaaaaattttgcccatttttactaaaactagcgtgaaagtcctgatttttatataaaatagaggccgatttacatagtcatttctatgcacgtccctcttttataaatatagagtacatgtaaggagaaaagtaaatgtcaattttaatgggaattatcggaattgtaattgtcttagcagttgcgttcctcatgtcaaacgacaagaaacttatcaactacaaaggcatcgcagttatgctggttattcagctcgctatctctgcttttatgatgaatacatcgattggtcgcaaggtgcttgactttatcacaagtgtatttacaaagatcttatcatttggtaacgacggaatttcgttcgtgtttggagatcttgcaggaaaaggcattttctttatccagacgttagttatgattgtattcgtttcagcattattaagtattttaaactactctcgtattttaccctttgggatcaaatatatcggaggacttgtttcaaaaattaccggacttccccaaattgaaagcttcacagccgtgaatgcgatgatctttggtgatacaacggcgctaattgcggtgaaaaaccacatcggaggtttaacaccaaaccgtttatttattgttacaacaacatcattagtatccgtttcttgttcaattctaggcgcatacatgcagatgattccggcggaatacgtcttaattgcccttccgctaaacgtattctctggcttaatcgtttcttctatcgttgcaccagtaaaagtggaagatgaaaacgaagtggatatcaaagcacctgctaagcaaggcacgctgtttgaagcaatcggcgacggagcactagacggcggacgcgttgcgttaatcgtagcagcgatgcttgtaacgtacgttggtcttttagcattagtgaactacgtattaaacggcgtaatcggattaactgttcaagacattttaggctatatcttctacccaattgcctttatcatgggtattccagcagatgaactaatgaaagccggcggcgtaatgggaacaaaagtagtagcaaacgaattcgttgccatgcttgacttccaaaaaatgatgcctcacctttctgaaaaaacggttggtatcgtatcagcttacttaatctcatttgcaaacttcagctcaattggtatcgttcttggtacgatccaagcaatcaacggcgaacaagcttcacgcgttgcgaagttcggcttgaagatgctgttagtcgcgacaatgggatcgattttaacaggtattatggttggattatttatttaatgaaaaagcactcacttttagtgagtgcttttttgttgggggtggttctttttggattatatctggagcgtttctacaatgttgaaatttattaaatatctctgttgacatacttcgagttatcgacactattatcaaatgctttttatcttcattctaataacatttaaattagttttacataatggattaaagcaatatctcttattcaataaaaaagacagcttgctttatcagcaaactgccttttttgtaatgacccgtccgggattcgaacccgtgttacctttttaaaaggacaatttctcgaccactcggtcaacggaccagataaaattataaaatggcagagaagaagggattcgaaccctcgcatcgcgttaacgatctactcccttagcaggggagccccttgagccacttgggtacttctctgtatggatttcccactgagatactgtggaataatagtaggcctaagcggacttgaaccatcgacctcacgcttatcagacttgggctctaccaaaaatgagctacttcccgtttatggcgcgcccgagaggagtcgaacccctaaccttttgatccgtagtcaaacgctctatccaattgagctacgggcgcttcctaaaatggtgcggatgaagggacttgaacccccacgtcataagacactagatcctaagtctagcgcgtctgccaattccgccacatccgcatgtgaaaaatggttgcggggacaggatttgaacctgcgaccttcgggttatgagcccgacgagctaccgaactgctccaccccgcgataataacaaagatataatggaagaggaagagggattcgaacccccgcgggctttgacacccctgtcggttttcaagaccgatcccttcagccagacttgggtattcctccatatttcaggttcaatggtggaccttgtaggactcgaacctacgaccggacggttatgagccgtctgctctaaccagctgagctaaaggtcctttctaagctctctattagaatgtggatacggcaatcggatttgaaccggtgataaaggtattgcagaccctgactatgccaacaataagtatggaaattatttatagtcagttacatttatccgtatgctaccccttcatatgaaacatggactagtaatttaataattaatatctgtttcgctaccaacaaaaattattttaccttataatttcgtagaagtcaacatctatgtaatttgtgttttaatacttaattttgcaattattaagcaggaacatacacctaaataaataagctctgtaacaagaatcatgattcttgttacagagcttatttttataaaaaggtttgcgtaatcgcactttctaaatctcttgtagaagattttaggtatcgttttgtaacattcacatcagaatggcctgctagttcggcaactattgcaatatctatccctttcttaactaactcatgacagaaagtgtggcgtaatttatgaggatttacattatatttttttaacatgtactgaaccgtacgtgcagacattcttctatcaaaattagagacaaataaagcttcatgattagaatcaagtgaatcaatatatttcttcaaactattccttgcttctgtagaaagaggaacaaatcgctttttacatcctttagcattacggataattaaaaaaccatcagatttgttaatctctacgtctttacgattcaaagcacaaatctctgatacccgaatccctgtatgtaataaagtatatacaatagcaatatcacgaaggtttccctcttgctttacttcagataaaaggcggtcacgctcacttgcttctaatgactgtggtacaacctcgttatttttctctttttgtttacgttcaatattttgaacaatttctggtttttcaagaaagcgtgcaaaaacgctaattgttacaaaagctttttctatagtcgacgcacttttattattagattcaaggttaatcatataagtttggacattatttcttgttacttgatctaaatgtttaccttcacttagaagccattcatgaaattggtttaacactgctcgataggttttaatcgtattatcagatttgcctgattctattaaccattggctaaagtcatcaatcaacggaataacttctaggctattttttttcactctaaatcctcctacatacactaataaattacgtaaaacataacatttaatttcgtagaaatcaatttaaacgaaattaatatacaaaaaaacagcccatcattgatatgatgggctgtttttttgcctgacaacgtcctactctcacgaggacaaagtccccattaccattggcgctagagaacttaacttccgtgttcgatatgggaacgggtgtgacctctctgctatcgccaccagacctattaaagatagttttcttaacactaaataaaaattgctaagtaaaaacaccgtgcacccgtcattgacatgatcaaataagcgttacttgtacagttagctcgaccgggttgtgctgcaacacacagaagaatctacttatggctgcttccttccggacctgaccatgttcataggtttctgttgtgcaggacctagttgtcaacaccacttgtccaagtcagaccttacctgactcatacctctgttaggaattaaaccctgctaaggcggattgcaggttacagggcaccgccatctccccgtctagcacggtatgtatagttaagggattcccacctatgtcgtcctcccaatctgttttgtgaacccgcgatctcgcaggtgggtttccgcatattaacgttctagcaatcctgtttcaaagacaggcatggcatcagtcaacagatgtaggaaccccaaataaacagtacggttcaaaacaaatagggcataacgtgcatcgtaggataagtatttaatgtgtttattgatgatatagattatcctacaataaaatttcgtagaagtcaacataaacgaaaaaataactcctaaccctcaatgttttattgatgtactgttgttgggaagggatttctttgaaagatggaagttataaggagtcgcgtttcattatattgagtcatccacttaaaagtgaagttcattatgattagatttttatacaaccttgatctaaccacacttttctgatgtggttattttttcttctcatcctctctcgataaaaataacagaaaaataaaaaagcctaaataaagcggcttttttattttaagagtaaattattgttctgctagttcagatatagaaacactttgcttattatttggttcatccaggttatgaattgtagctaccccattttgttggtctacatgctcaatgtaaatacttttcccgttatatattacattggccatgtccactgaatcggcaatttcttgtgctctttgtgcatccatctttatctagcctcctttttatttatgacagtgaaagtatttgtttttaattaatttttatgcatttaattcctccatacaaaatcaattttaatttttcaaatgagacataaagcagtaaaaaaactatctcctttattatttgagatagctttttattttattattcaatttaatcttcttctggaatcttaattaaaatggctatagctattgttgccaaaaatataacccctaaagttagcaatagactcgtactcatgtgcctcatctacccttctctcttcatccctatgattccattttagcagaggaaattagttaataaaactggaaatgatagcgttttactaaaaaattatacatgttaagataatgtagttgttttaactcaaccaatgtattcaactttttgcttgaatagagcaagctacctttttcctattttggggtagccctttttttatcgtgataaaataaaatgttgttttggatctattccttcctaccctcggtttacattcgttatttacgaatctgttcaatctcttcttctgtaagctccgttaattcagatattgtttgattatccatacctttttgcagcattcttaatgctactctcttaatagctctttttcccccttgcttttcagctttttttaatgtcaatttttcatctacttggaattcctggtttacttcataagtcattaacatttggggatcctcagttacacgtgcccattcattcatcgcgtttttcaacgtttgatctttctccattacaacttcctccaaaaatgagtaaaatcttcatctcttgacactttaaacaacagtaattgttttactaattatgtgtctcttttacgatactattctcacctattccaaaatcaaattaatcccataaagcttgtccgttcaccctaaaactaaaaaagagtaattactgcattaggggaggtgtaggtagtaatgtaagatgtgctcggttgtttatatgccgaggttagcttggtgataaatagggttttgattcagaagcaactaacaaattatttatttaatttatatgttttttcttatagttgcacatattaaaaacaatactaaatgaaagcgagatgagataagtaatgtcaaaacaagggatacagaaaaagaatcagacaagagagcaagtagagaagcaagataaaagaaatgatgtcgaattaggcaatgaatttcaaactggcaacacaagttctcagagccagaaaaaaagtggacgccaagtaaataaaaaataaatttaacctttcaaagataataagaaacctcagttcaaatttatgacttgaaccgaggtttcttttatagagtgaagaagaattatacgaaaaacaggcaccaagctaaagagaatttgaattctattatggaaacagaattcaaataaaaaagtgtaacttaacataaccactcttttcgaaacttataataaaaacgacctttttatgaatacgatattatcttatatctctttttatatttaccctcaaattttctaacctgattctctgtataaaagtgtgctactttatattcgtcgttattataggcttctgcgattctaagaggttgtttaacatcttttggatagtaagtcggcattatggtcgatatacgattataagtcagaacacctgtatttttgcttttttcacgatttagtagataaagtcctttaaatattgcttcaaatcgtcccgaagaggtttttgcatatgcgaatagcgcgatcttctgattcagctgatacattcttttttgaaagtaggtttcgttctcttctggaattgtattatattcaataaatatttcctcattttcaagaagttgattgttccacgtttcattagggaaaaattttaatcttttaatatctgtatcttcttcaaacttgtgcggcgcgccgcttttttgaatcccgtgagcatagccagctccgaacacattgcaacagtctgcaactaaccgtaaagaaacattgtcatcagcatctatatatccttgttcaatataagtatttggatcatattccttctccaaatcccatggaataaaccatttctcctttgttagcagattaattttttctactacctggtcgatcttttcgtgaatcttttcaagagattgagtagcatctattctgataaattcacaatctaacgcattcacaatatcgttttttctaatttcatccagtgtttgatttatatcattcttatgatgggcttcatcaatttcaaccgccaaattaaactgcggaaaatacaaatcaattaatccgtattcagccttttggtttttatttgatcgtactacatactgttgagtatttatttttatatcgtaattatcaagcaaatgccagatccttgtaatgatataattttcatcgttttttttattcgttttcgctaattgtcttttaatataatcatacttgttcattacttttctagatcctctctttttcctctgctgtagcactataaaaatgaatgcctaaataaccatatccaaacggtgaaggcagtgcaactcttttgatgaactgtctactggaccttgcctttacgattcctccctcttgttgctataagtttctgctagttattttgaggtacatactcacatactatttccaacatttatatattggtaaaataaataatatatactaaaattaaccgcaacaaacatatcgagacttaatttcaagataataagtccctattagtgtatattaagcagtttgatctaacctattattaaaataaggaaatttaatattgtaatataactatatatatgtaaacattaaacatgtattttaaatacataataaatgcatgtttaatgtttacaggaggaaatgtactgaaatgaaaaagttttttaagattggctgtttaggatttatcattcttattgcacttattgtagtaattgctgtcgtagcatcaggtggagacgatagtggttctggatctagttctaactcttcaaaatcagaagaacaaaaagctcataaagtgggagacacttttacagtagataataaagcggaagtttctgtaacaaaagtagaggaaagagaacaagttggaaaccaatatgcaaacaaaaaagcttctgaaggcggtacacttgttgctattcaatgggctgttaaaaacatctctgacaaaccattaggtgctttttcaaccccaacaattaacctcgttgatgaaaaaggtacaaaatatgacgctgatattgatgcaacatcaaattatgcagttgaaactaacattgatgactctaagattgcaagtgatttaaatccgggtatcaaagttacggatgttgacgtatttgaggtttcaaaagatagctatgcaaaaggtacatggtatattgaaataaacggaagtaaagttcaaattaaataatatttttccatagagtaaaaagctcactaaacgttcaacgtttagtgagctttattatatttatactattatctatacctgtgagagagtatatggggaaacggtctttttttctgcagagaatgtggaatagtagcgggatactatatacttatttcaaacaaattcaatttacgcaccaaaattataaatagagtcccttaatgtaaattgatgcgatattcttagcaatttgttctacaggatgcttatattcattacgaacaatttcccaaaggtacatttcattagtgaaaaaccaccctcttgctactagctcgttatgtacatctttacgtgctaatccattgcgctgcgcataggcaatgtcttctgaaattcgttgaataaacttttcccgaatgttcttccatttctctgaaacgagaggagaaataccaatagcctgctcaaacacttgcagcattttttgttcatcctcagccatttttaaaaactcgttcgtttgtttatgaatcatttcttctgcttcatttacagatgcgggtaaaaatgcagcctcggcaatttcataaaatttctccataacattctccattaatacaactaaaaagtcttcttttccttcgaaatgaacgtatgcagtaccatacccaacctttgccttttttattatttgagtgatagtcgctttgtgaaaaccttcttgtataaatacttctcttgcagcttctaataatttttgtcgagtctttattgaacgtaaatgccgtttatcttcaatgttattctcattcattaaggttccttcctccctatccgttttactctctaggatatagaagttttcacaaaacgaaaagaaataaagataatttattacaaaaattatttttttaattttcaaaattatattattgacactgtgtcatattctttgttacgattcttctaggatacatattaagtaatgcagaggaggaaaattatgcaattaaatacctttaaacccacattagagtacgccaaacagttagatcaagaagactccctttcaagttttcgtgacgaattttatttaaagcctgattccatatatatggatggaaactcattggggcttctttctaaaagagctgaacgcagacttatagaagtgttaaatgattggaaagaacaaggaattgatggatggactcaagggaaacacccatggttctccttgtccgaaaaattaggtgaaatgagtgcgccgttagttggggcttctagcgaagaagtgattgtaaccggttcgacaacagttaaccttcatcagcttgtagctactttctacagtccaaaaggaacgcgcacaaagattttagctgatgaattgaccttcccatctgatatttatgcgcttcaaagtcagctgcgaacccatggatacaatccagatactcatcttatacgtgtaaaaagccgcgatggccgttttttagaagaagatgacattattgaggctatgaccgatgagattgctttaattatcttaccgactgtactctatcgcagcggccaaatattagatatggaacgattgacggctgaagcacacaagcgtggaattttgattggatttgatggctgccactctattggtgcgatccctcactcctttagtaaatgggatgttgattttgcatattggtgtaattataagcacttaaacggtggacctggctgtgtaggcggtttatatgtaaataaaaaacattttggaacagcacctggtttagcaggatggtttagttcaaaaaaagaaaagcagtttgatatgaagcacatattaacacctgctgattcagccggtgcttatcaaattggaacaccccatgttttaagtcttgctcctttaattggatcgctagaaattttcactgaggctggtatagataatattcgagctaaatctcttaaaatcaatcattatttaatgtatttattagaaaaagagctgagtgacttcaaatttaccattggaagccctagagaagataaaaagcgcggagggcacgtaagtcttgaacataaggaagcagcgcgcatttgtaaagcattaaaagagaatggtatcattccagattttcgcgctcccaatattattcgtctggctcctgtttctctttatacttcttatacagaagtttgggaagtagtacaaactttgaagaaaattatgaacgataaagaatatgaaaaatttaaaaatgaacgtgaagtagtggcgtaaaacctaaactacttgtttttttaacaagaaaagtaagcgctttctaaaacttaaggaagctatttgacgtagatatgcagccaaaccattattttgaaactatgagggagatgaaatatgaaaacccacaatactcaattgccaaacaaagatgacgcagaaaagggattgaaacgaaatctaaaaacaagtcaattgacaatgatttcgatgggctgtgcaattggaactggacttttcttaggcagtggacttgcgattcaaacagctggacctagtgtattggttagttatgctttaggagcttttgttgtattacttttaatggggtgtctggcagaaatgacagtggcccaccctacttctggatcgtttggaacaatttccgaaaaatatgtacatcccctggcaggctttttggttcgctattcatactggatagccaacgttctcgccgttggagtagaagtaagtgcaatagccgtgtatatgaagtactggtttccaagcgttccgggtattgtctggattttagtgtttgctaccatattaatctatgtaaacgcaaccagtgttaatacgtttgctacttttgagtattggttttctatgataaaaattagtgcgattgtgggctttattcttttagggtcctatgttctgtatggaacagatgcacgtcctaatatgggtacaggtaattttgtaaatgatggtggattccttcctttcgggtggtggggaatgtgggtagctgtctttatttccctctttagtttcttaggaaccgaaatgattgcagttacagctggagaagcaaaagagcctgatatagccgttccgaaggctttaaaagcaactgtgtttcgtttaactactttttacgttttgactataggcatcatgttaatgattgttccatggaagtcagctcaagttgataaaagtccatttgtgaaagtaatggaaattctgaatatccctgctgcctctggaattatgaattttattattttaacggctgctttatcagctatgaatagtcagttatatgcttccacacgtatgatgttctccctctctcaaagtaaatatgcaccagcttttttagggagactaagcaaaaaaggtgtaccgctatgggcccttgctgtatcaaccctgggcatttttcttgcggcagcagttaatggactgctcccaagctcttcgtatgcctttatgatgggtatttcaatgttcggagctatgttcacatggcttatgatatttgtttctcacctctacttccgaaaaaaatgggagaaatctggcggaagaaaattaccggtaagaatgcttggcttcccctattttacgattttaggagccatcttattactcggtttaatgattaccacttggtttacagattttaaaattatgcttcagtttggaattccttggttagctttcttatccattgcttattttatctctaagaaaagaaaagttaaccatcattttgcagaagatatggctaatagcagcttaaaagaagaattaaaggaattacgttaacgttcaagttattttacataaaaacaagggggatacaaaatgaaaacgacaaataataaggcaccaaatgcagttgaactagagaaagaacttcaaacggactttcagaaatctatgtcgtatggagactacctgcaccttgataaaatattatctagtcagcatagactttctaatcaccatgatgaaatgctgtttattgtcatccatcaagctagtgaactatggatgaaattaattttacatgaggtaacagctgctattcagtgcatccgtggtaataacctggaaccttcatttaaaatgttatcacgcgtttcaagaattcagcagcagctaattcaatcttggagtgttctctctacgctaacaccagcagagtacatggaatttagagataaattaggtcaatcttctggctttcaatcttatcaaaatcgcctgatagaatttgctttaggaaataaaaatgtccatacactctctgtttaccagcatgacgcggatttgtatcaaaaaatgcaaacggctcttcatgagcctagtatctatgatgctgctgttcatgctcttatgaaacgcggattgcaggtagatcaagaggtcttacaaagagattgttcacagccttacgaaccgaatgccagcgtagaggatgcgtggcttactgtataccgtaacgttgatcagtattgggacttatacgaattagcagaaaaattagttgatatcggaaatcaacagcaaatgtggcgatttagtcatatgagtacagtagaaagaattattggaaacaaacaaggtacaggcggatcttctggagtgaattacttaaagagagctctggatcagcacttcttcccagaactatggagcctgcgaacgaagctataaatattctataaaaagatagagaggtagtaagaatgagcaaatggattgatatttcacagcctctagacgacaaaatagcaagatggcctggtgatactcccttttcttatgaagtgaattggagtaaagaagagaccggttctgtaaatgttggaaaaataacaatgagtatccataccggtactcatatcgatgcaccttttcattttgatagtgatggaaaaaaggttattgatttagacttagatttatatattggacgtacaaaagttgtccatatcccagctaataaaagcattggaataaatgaattgtcagatgttaatttaaaaagtgttacacgcttattgattcgaacagacgcgtggcaagaccgaagtgttttcccggaaaccattccttacattgaaccaagcttagcttcttacttagctaagtttggcattcgcctgctaggcattgatctgccttcagtagatccactcgatagtaaagaactagcggctcaccatgaacttgcataccataaaattcacattttagaaggtgttttactagataaaatcccttcaggagactatgaactaatcgcagctcctcttcctttagttgaagctgatggaagtcctgtgcgcgcgctgctgaaaaaagcgactattaaaagagcaattcttttcccttagatagtttccgatgtatacaaaaaagagcggtatataaatataccgctcttttattatagctattcaaattttttcaacttatttcttattcatatctatttctttccttgatactcctgcaattccccagtgcgaagatggaacctcgttgacaatgatccttactctctccttttcaatgtcaaagctgttagaaattgcttcggttacttctactaacatgtttttaatgtctttttcttctcttccttccaaaaggtgaacttgtacaatcggcatactatcgacttccctcaaagttttctatacaacaaaaggtctttatattcagatgaaataattattaaaaaattctagttagctgcagctgaaggatacgctgcctaaatcagcgaactgtgcgtggatactatcacctggtctaaaagaaatggcttccgataccgctccagttaatacgatatccccttttttcaacccttctttatgttcacctagtttattaatcgcccaggcgacagctttggcagggtgtcctaatacggcagcacccgcccctacggtagcaacctctccgtttttagacattaccattccgatattagctagattcacttggtcaggctttatccaattgctccctacaataaaacgtgaagacgaacagttatcagctactacatcaggaagaataaatttaaaatccaagtaacggctgtcgataatttcaagagctggtgcaacatattttactgcttttaaaacatcttcttcagttaagttggttccacagaggtcttcccccattaaaaaagcaatttcaggctcagcttttgggtggatcagctgattaaatgctataggttcccattcaaatcccagcatgtcgcttgttaagtatccataaatcgcttcatgtacccccatcatttcctgcttagctttacttgttaaaccaagctttacacctactcgttttacaccatcttgtacttttcgttgtatcaattgtctttgcaagctgtaagcgtcatcaattgtcaaatcagggtagcgttccgtcactcttattacttcatacccttctctttctgcagataaaagatagtcaacgatttctaaatttccgcttttcgttaaaggcatgatcacatttccacctttctttgagctaactcagcagccacgtctagaatcatatcttcttgaccgccgactgcttttcttttaccaagttcaagtaaaatatcacgtgaatccaaattaaaacgctttgcagcacgctctgcatgaagtaagaaactggaatacacgcctgcataacccattgcgaggctgccttttcgaatctcttgagatcctggcaggataggtcctactacttcttcagctagatccattattttatacaaatcaatacctatatctattcctaaacggtttaacacggctatcaatgcttcagtttgagtgttacctgctccggctcctaaacagcgaacgcttccgtctattctagtggcgccttcttcaatagcagcaagcgtatttgcaacagctaacgaaagattattatgagcgtgaaaacctacttcaacttgaagagattgacgaagtgctctaacacgttcacgaacttcatgaggcaaaagagctcctgctgaatcagttatgtaaactccttgtgctccatagctttccatttgctttgcttgctccacaagcttttctacgggtgctgaatgggccatcattagaaaaccgaaagtttccatccctagtttccgagcatattcaatgtgctgagcagaaacatctgcttccgtcacatgggtagctactcggactaagcctgccccaaggctatttgcttgcttcagctcatgtaccgttccaattcccggaattaaaagaacagcaatggtggcttgtttcgcttcttctaccgcagcctcaattaatttcatttcgtcaacgagagactttccgtattgcagcgtcgagcctcctaacccgtctccgtgactaacctcgatatagtgcatccctgcatcgtccagcgtcttcgctacactttttacttgtgcttctgtgaattgatgtttgactacgtgacttccatctctgaggctgacctctgtaatcttaataggcttatcactgttacgtttcattcgtcatagccctctctttctttattcctctatataagctctcttcgagtttgtagcgggcataatcttccgcaaccttcgctgcagcagccgtcataatatctaagttaccggcataagaaggaaaataatctccggctccagttacctctaaaaagactgttacttgatcactatcaaataatggttcttgctttaaattatagcccggtacatattcttgtacttttttgaccatatctttgatagccttttggatagcttccttattcatatttttcactttacaataaattgtatcgcgcattaagataggtggatcagccggatttaagagaataatagcttttccgcagtctgcaccgcctactttttcaatagctttccttgtggtaacagtaaactcatcaatatttgctcgtgttcctggtccagcgcttaggctagaaatagtagctacaatttctccatatgttacatctgcaacttggttgatggcatagatgataggaatcgtcgcttgtccgccgcatgtaatcatgtttacattttctgattcaagattttctccaagattaacgggaggacacacgaaaggtcctttggcagcaggagttaagtcaacaaccatttttcctaagtcttttaaaatctttgcatgtctaacgtgagccttagccgatgtagcatcaaaaataatttccgccagatctggattttcagcaagggcttttataccattactgtatgtttgatatcctgcttctctcgctctttttagaccatctgaatccggatcaattccaagaacagctgttaactcgataaattcgctgcgctgaagcttatacatcaaatcggtcccaatatttcctgagccaataattgcggctttcactttttccactactcttcaccttctttccagtattattcaaaacgtacggatactgaaccaagagagccgaattctgcttttactacatccccgctcgcaactggtacggctgcagatagagcccctggtaagattaattcgccggcttttagacaaatatcgaaatcggatagcttatttgccagccatgcaaccgcatgtgccggatgtccaagggcagctgccccagctcctgttgcgacaagctctttatttttatagagaatcatactagtcgtacgtaaatcggcttgctcaattgtggaatatttattccctaccactactttggcagaagagccattgtctgcaaccgtatcgactaatttgattttccaatcggcaatgcgactatcaatgacttcgatggtcggcaccacgtatttcgttgccattaagacatctaaataggtaatgttgggcccttttaaatcttcttctagaataaatccgatttccgcttcaatttttggagccaccattgaatgaatgttgattatttcattatccgttactttcatatcatcaaataagtgtccataatcaggctcactaactcctaacatatcttgcatggctttactggttagaccaacttttttaccaataatcttttttccttcttccagctttctttttacaatctctaattgaatatggtaagaatcagctactgataaagcagcatgtcgttctgtaataggagaaattggctgattcgtcttttctgcttctaaaagttcttctgcaagctcactaataagtgtacgcatccgttaatcacctcttttatagagttaaagtttcatcgtaattgttttggcttcggtataaaattcaaagctgtgccgaccgccttcacgaccaattccacttgcttttgctccgccaaacggcgttcttaaatcacgaatataccagcagttgatccaaagtaatccagcagtaactccagaagcaacgcgttgtgctcttcgtaaatcatttgtccagacaacccctgctaatccataaatagaatcattggcaatttgaattgcttcctcttccgttttaaatggaataacaacaagtacaggtccaaaaatttcttcttgagctacacgcattttgttatctacgtcgtaaagaacagtcggctcataaaaatttcctgtttctaaaccttctgctctttttcctccgcatgccagcttagctccttccgccaaaccaattcggacatattcatcgaccgtttctaagtgactttgtgatacaagtgctcccatgtttgtctcttcactcagaggatcgcctactttaatatttcttaccgctgctgtgaacttttcaagaaactgcttataaatgctttcttgtacaagtaaacgagaacctgctaagcatatctctccttgatttcgatagattgcttcgatagatccttttactgcttcatccaaatccgcatcttcaaatacaatattggccgattttcctccaagctctaacgaaacaggaattaggttttctgctgcatttcgcatgaccgtttttcctgtattactttcccctacaaatgaaatacggcgaacggacggatgagtagacataatagtccctaccgtattacctggacctgtaataatattcaatacaccaggaggcaatccagcctcattagcaatttctccaagcatcactgcacttaacggtgtataagaagcgggcttaataaccactgtattgccagatgccaaagcagctgaagctttccatgtcatctgcataaagggtagattccaagggataatgaggcttgtaactcccgctggtgaatacttggcataggacatgacattatgcttttcgtaatgctcatgtaccatatatttagccatctcggcaaagaaacgaaagttttgagctgctcgtggaatatcaaactctcgactttctttaataggttttcctacatctagcgtttctaaataagctagttcatctactttttccataattaagtcagccattttacaaaggatggcagagcgctcttcaacaggcatcttgctccaaataccgctttcaaatgcacgctgagctgcgtcgatagcgcgctttgcatcttctgtgccaccattagctacagaagctaatttctcattcgttgctggattaaaggtatcaaaggtttgaccggatagagcgtctacgtattctccattaataaaaagctttgcatcttttaccgtcattttttcaataactgcctctttactcatcggatatcctcctcatcctcaatctctaaaaccatttcaatttctacagctgtgttattggggagctgagccattcctacagctgaacgggcgtgtttccctttatccccaaatacttttacgagcaagtctgaagcgccatccattactttaggctggtccgtaaagtcctctgtactatttacaaaaccaagaattttaacgacacgcttcactttgcttaacccttctaactcgtaacttaccgcactcaataaattcagcatggattgctgagcagccttatatccctcttcaattgttaaatccttgcctaacttgccgtgatattgatctacaccttggccagcagtaaacaataaattacctgttcgtacacagctgacgtagtttcctactgaaggacgaacctttgacagcgttaagccaagttcttgtaatctattctctagtgtttgtactgttggcataaatgtcactccttttctcttgcccgatgtttaaaaacttcgcggcatttccacctaacatatctaatctttgttgctcagttaaatccagcgtttcatccagaacttttcccggaacaacttcacgcagtaaaaatggataatccgatcccataaagattttttcatgtccaaaacgttcaatcatgtactttatgttcagtggatcgtagtttaacgaatcaaaataaaattgctttgcatagtaactaggaggatgtgttgtctgtctaaggtgcggccatacttcccaccctttatctaatctaggaagaatataagggaaagatcctcctccatgtgcaaaacagacttttaatttagggaatttctccataatgccgctccatagaagagttgcagccgctagtgctgtttcacttggcattcctaccgtatacataaagttatggtttggcattcgatcgcggcctaacgtttcccacgggtgaatgaaaatgggcacttcccacctttcagccatttgaaaaaactcaatgaaagatggatggtctaaattttggccattgacgtttgtcccaatttcaattccatgcagttttaattcattcacgcatcgttccatttctttaatagccgtaggaccgtcttgcataggaaccgtccctaaaccaacaaagcgatcagggtacttagcaactgtttctgcaataaaatcattttggattttagccatttctaatgcatgttcgggctgagcccaataagagaaagtaacagggataggagataacacttgaatatctactccttctttatccatgtcagctatacgtttttcagggctccatacttggtccgttacgtctctgaagtttttccctccgaccataatcgatgctccgcatgtacatgtacgttctagcacgggccagcgctcaccgccatatttttgagcaaaatcagggaaactttccggaatgatatgtgtgtgaaaatctattcgcatttccattcactcgcttccggtaccataacatgattacactttttacatgtgcgtaattctaagctgctgttgaactcctgaatggcttcttttacttgaacttcaatattggttagctgaactttcacccgatgcatctcggcatcacattcatcacagaaccatacaaagtcttctaactccccttcacttctgtttcgctcgataacaataccgattgtatccgctacacgatgtggagaatgcggaacgttcggaggaagtaaatacacttcgccttctttcaccgttacaacttcgcgcttgccttcttcattaatgatttcaacatagcaatcaccttttaattgataaaagatctcttcagaaggatctacgtggaagtcacggcgtttattgggtcctcccaaaaccataaacatcaattctgagtctttccatactactttattgtttacgggtggttttaattgatctttatgctcttcgataaacttccaaagatttaatggtttagatgattgaatagtatttgtcattgagataagctccttttaataaattttaattttcaaaaaataatggttggtttgattgcacttaaaatactaagatcttaaaatatgactaattcaggatttccagctcgcttacttgtagctttttctgcatgtagacaacttcgtttgctaaattcttaatgcgacctaacacttccggatcggctacctcattcttttgattaaagtgagtcgtatgagcgtatacataactcggtgccacaaaggcacgaaagtaacccgcaataggctttaactgattttcaatgactaaataatgctgatacgtcccgcctgtggcgatgaaccccattactttatttcgaaaaacctgtggatgtattaaatcaaatacattcttaagagcacccgtgattgatccttggaagataggtgaaccaattacataaaaatcagcgctagaaataatttcaatgacttttttagtaccttctgaataagcagagggatcgcggccatcacaaaattggatagtgtaatctcgtaaatctaaaaattcaatttcgatatctggatgctgcaatttagcttcttcaagtacttgttgaacaacagcgcctgttttagaacctataatcgtgcctgatatgcctagtaatttcattttcactttcctccttttaaaaaagttccatacttatcttcaaacactcatttttttatacatattccttttgtaaagaccagcctaataaatcatttgattggtcaattgcgccttgctggattagctggcgaattctagtagaagaaattcttgttccttctgcacaacagacaggcgggatgatatctacgagaaagtgctttgctagcagtttaatatctccttctctattccggccgaaacgaaaatcgttgcctactatgatctccgatggattaagcttttttaagttactgataaaatcgattgatgggcgcttagcgtataattcatcaaaatggataataactgcgtagtctactcctaactctgctatcagatttaccttttgatcaatgggcgttaacacttgatcttgttgaaaatgaaaacgaggaggaggatcaaatgtataaacaacgctaggtacctttaaagctttgcttcgagttacagcttgcttaatcactgcttgatgtccttgatgcacgccatcaaatgcacctatagctattactgatgctggtaaagttagtattccgtcctcatacctttgcatctttacacctcccttattaagaacgtgaggaacctagaccctgtatctattaataaagttcatttttagataaaaggagtatgggtatcagctatttgttacttctttctttttaacttctgtatttaaagcagcatctaccatggcaaatgaatggctgcgcttatagctattgtagaaaatagctcttttacggattggatctcctgtatagtatcgctcgtattgaagtaacctttggccaaatgcttctccacataggtcccacgctaatttaaataattgaacacgatctatagcaggcactccttctcggcctccataataacgatttaaatcctctcttaattcaagattttcaaaatctgctcctgtaggagacatcagcaaaccgcctgcaccaattgtttgcatcacttcaatagcacgagggtacattgtaggaagcaatccacgaattgtttctaaagccgtttcgtttggaagagcttctcctttttcattaatcatatactcatactctgatgttcgaagcaaagccctaatggattctactgactgtatcaactcccctaagctctcttgaacgtttagatatccgtctacaccaattgcatccgctactttacaagctacttccgttgcaaattgaagtttaactaatcctcttacgccagattgatgtgccggttgctgagcgattcctgttttaggataaagaagattggcagcttcaatattgttatataaaaacactcggttccaaggaatcagcacatcgttaaaaatcaagactgcatccatctcttcaaatcgagaggctagcggatgatcaaacactgatcttgttccgtcttgcatagcttctcggcaaaggattcgaagtcccggtgtatcaatcggcagcgcgaaagcaagtgcataacgttcatcgccaggtttaaaccctgggaatgaataaacaatcacttcatcggtaataggtgaaagtgtagctagcattttagctccttttacaacaagtccatccggtgtttctttgacagcacctaaatgagtaaagagatcttgctgttcatgggaggctttgcttcggtcattctgcgggttgataatagcatgagttaaaaacaagtcattatcacgaatataacggtaataatctcttatatttttgccccactgttcattgtaatgatctaggaaactagcattatgaaataaagaggtgactacaacatttaagaaatccggtgttcgtcccatcagtccaaaggtagcttttgcaaatgcttcaaacacttctctgcgagctactaagtcttcgtagcttttaggaattaagaatgcatttgatattctttctcccgtttcttcgcaaatatgagtaattttctcttggtaagccgggtcatgctgcatatcgtacaacttcgcaatttctaaaataggctgttgaaacaccttttcttcaaatacatttgtaatttttctgcctcctaaccaaatttctggctggcgtgattttaatgcatcaatatattgagcacctgtacgaatccccatatttgttcatccccttaaggtttaatagtaattaattgaattatagtatttgaattttttcaggggtgtagcctcgttaacatttttttagagttttttatttttggaatagacggagtagctcgaataagaaatttatattattgcatttacgcatttttcgctttaagatattgtagagagcgtaacgtttttataaaaatattagcttattaaaaaagagagcaaataaagcgcatattgttgtaagcgcttacttattttattttttatagcaacgtaaataaaatatcctaccctctagtgtgttacttgatcttacaattgtcttttcaattttttaggcgtatcttatattttgattaaggagtgagtatgatggctattctcttcaatcatgaaaataatttcaaaaactacttaatgtacggaaaaaggcaatatatgaaacaaaaaaatgtggtatatgaacaaggagacataggaaaaggattttattacttggacagtggattaattaaagtccacacctctaccccattaggaaaagaacgcgtattaaacattgtattgccaggtcaattattgggagtccaagcaatggaccagcaagctcatttcactactgctactacggtaaaagattctgtcctatattattttagttatgacgattttaaaaagcttataactattcacccgcccatactaaaccttattacaaagagtattattcaaaaaatgcatatcttagctgaacaaattaatttacatacgttaactaccgagcagcaaatcgccactgtgcttttaaacatctatcatgactttaaaagctatgaaattcctttaacacaaaaggacctagcaacgtgtaccggtttaacaaggattacagtttataaaacgttaaaaaaatggaaagagaaaaaactaatagatagtaaaaataaaagatttctaattaagaacccggatctgttaaaaaactatctctttcagtgataaacgctttggtcacgttatcaaagtaaggaataatgctcgatgcagtaaatgtttctgtacgcttaaaatacacgtttatagaaaggtgattaaatggtaaaccttcgatacatatggcgtccctttttaaagtatggacagatgataaaattagaagaaaacaccacaatatattatcaaggagaagttggtaaaggattttattatttagataaaggcagtgtaaagattactctcttaactgagaagggagcagaacgtacggttaactatgttcctgaagggatgttattaggggaaaacggtattaataaagagccttatttaacaacggccgtaaccacagctccatccgttttatattattttactaatgaaacaacgttaaaaatatacgaggaggaaccgaaagcagtcattctctttacaaattctcttctctataagtttagattactagcagaaattattacgtttcttaatctccccgttgaacaacagatggctcattatttagtaaagcttataaaagaaaatgaggaatttccctttaatcaaacatcctttgcccgctacgttgggacttcccgcattaccgtgaataaaatcattcaaaaatggagtaaagaaaaattgattgagctgtctaatcaaaatatttatattaaaaacatcagtaaacttaaagaaataagagatcaaaacagcaaaaatataggcgatttagatatgctaatgctgccagtaatttgattataaatacacttatgatactgtttcgcacatagaaggtatggaggaaatccagcataagtgaaaatataattaaataaaaaaagaagttaccttgtggtagcttctttcactaaaaaaggagtatattcattctaaggttaaccttataccataaatcgtgtttttcagagtactactacgatttattgtgtttatcctaatcaagacgtacctctgtttaaaagttcaattaaaatcgacttgccttatacacatatgcctttatttcaaagttacggttaattctctttctgtaaaaacttgtttagcaataaaaatagcatttaacgctctaggaaagccagtgtatggaatacagtgagtaatggcttctactatttcatgtggtgtgagacctacattaagcgcagcattaatatgaacatttaattgtggttcacaccctccttgtgtcgtaagcgcgcttattgtaactagttgtttttgctgtaggttaagtccttctcttgtataaatatctccgaaggcaaattcaatgacatatttcccaatgtcaggagcgatgtcttttaatgattcaattactcgttttccaccctctccatctacttccattaacgttttccaaccattttcgtaacgttcattcatcaactgaatctctccttacaactgagttattttatttacaagttagatattacgctttagagcgcgctctaaagcaagcattttatttctcatgttataataataaatatggaaaatttattcagtattcaacaagtagcaagtatgaccggtctttctacacatactttgcgttattacgaaaaaattggattaataaaaaatgtacaaagagaccaaaccggatatcggcaatatacagattttgatctagcttggattcagtttttaattcggttacgtgttacaggaatgcctatgcttaaaatgaagcagttttctgatttgcgacagaaaggagattctactattactgcaagaaaggaattgttagaagaacattataaagatgtcttaggcaagatagaggaactagagttaaattcgcagagaattgaagaaaaaattgcgcactataaaaaattagagacagtggaaaaccaacaatcttaataaatataaaaaagaacttgaaacacatttttcaagttcttttcatagtacctaggctaacatcaaatagaaggtgctgaatttatatatttaatagagacccacctaatactctatctataacttcttgactagatgtatgacgcttaacagcctgtagatgtaaatatcgatctccatatggaaaatctgaactaaattaacgttctctgaggtatttcttttatagccaaagacaaggcgtatattgtataaaatggctttgctataggactaatataaaatgatgtctagttattgtattattaccgctaggctgtttatacactagtaatttctatttcttcaatatttggcagtgcttcaattgctcctatctttgtacataccagcgctccaactcggtttgcaaatgcaataatgtcgagtagctgctcgaaatcatttttaatggatttgatattctgtgtattagctaatttgaacaacgttgcacctacaaaagcatccccagctcctgtagagtcaattgacttaataggaatactcttcactagttctttttttctactattagatatcaatgttcccctttttccaagagtaactgctacaattttagctcccattttatgtagggtatcaacacctacttcatgattcttaatgcctgtgataatctctaattcttcatcacttacttttacaaaatcacttaaagcaatagctttctttgcgattgagatgaaatcaattaatcttcctttccataaatctcttcgatagttaggatcaaaagaaataaactttccttcctctttagcactagagataaggcttaaataagtttcacggaatggagaagttaacatggccgtggctgaaccaaaatgaaggattctagctttatttatttcatttaggttaatgtcctccattgtcattaaagcgtcagctcccctatgaaatacaaagtctcgctcaccattttcttgtagagacacaaaagctagggtagttgctaccttttcatcccaagcaagcatcgaagtatctacgtttaatgaatttaaggtttcttctaaaaagtaaccgaatgggtctttacctactttaccactaaatgatgcattaccgcctagtttcgctatggttgcgcatacatttgctggtgctccaccggcattttttaaaaattggcgtccctctattaaattggaattaatattgctacaaaagaaatcaattaataattctcctacacaaacaactggagcattttcacttatgctattttgcacttatatcacactcatttacttagattttttctctaaatccaaaatcatttgattatatgttttttcagttaaaggataaaagcagattattaatacagaaagtaaaatgaaaattcctggcactagagcattcatattttttatagcatttaaggaagctacggtttgttctgcattagctacatagcctgctatccccaaatagatggctgagaatgatccagcaagtgcaacccctaacttattagtaaaactcattaaggaaataacaacaccatctgctcgaactccagttttccattcagcataatctacacaatcggcaaccatcccccaagctagtgtgtttagtggagtggtaaagaatcccgaagcaaacagccaaaataaaattaaagcaattgaatcaaaagaagtaaattggagtcctatatatgaaataagagatactgtagctgatacaatcattacactctttctaccccatttatcagagaataaaggaataaataagttactaattagcgcagctccaaaaaataaaacagtgccccaaaatactaattccttttgatgaacattgtaagtaaaatagtaaaccattgtactaagtttaatattaaaaccaatagcaaatgccaagaaagacgaaactagtactagtagtggtttgtttttaaacaaaacagataaagttactttaagcccatgttttttactctttttaggagcaatgcgctcgcgtactgtaaagaagctaaacagatttaaaatgatacttacagcagcatagactagagcagtcatctgaaatccaaattcttgatttttgcctccaatagctgttacaagaggggttgcgcatgaaatggaaaggaggattcctacataaaccaatatcatacgagtagttgttaaaactgtgcgttcctgaacattattagtaattcgtcctgttaagctattaactggaatcgtttgcatactaaacgtcatccctaataagatataggtaatatacatatatataatatttccagttgaccctaagtgaggattggtaaaacataggatagtgaagaaagcaaaaggaagtgagacccataacaaatatggtcttgcttttccccaacgtgtattagttttatctaaaataactcccattatagggtcgcaaatagcatctagaactcgtactactaaaaatagcgttgcaacagctgcaggatggatacctccgacatcagtataataaaaaagtagataggcattaacgaattgaaaaacaatattatatgccatgtctcccgatccatatccaaaccgttctaaccaggataacctaggaatagaattaggtttacctttactttcagcctctaatatttgtgattgttctgcgtttaacataggtaatacctccagaatgcgttttcaaaaatatgttaagaaagctagtcgtattataaacatttaccttaaagaaaaaacagatgcggtttagttgcaaatgtcttattttaactccgcatctgaaaattaaaagttcaagaatctcgtcataaatatcaactagaaatctagctttcaagtataatgtttttattcgtttggatacactataatttttaaacattcgtttttaaaatttagtgctcgctccatcgcttcacgtgtgccggctaacggatatctatctgttacaagattctttgtgtcaattgcaccggaagtaagaaatttaattccttttggataagtattggcatagcggaaaataccatatatatcaatctcattatcagcaataaatggtacatcgagtggaatatcgctttgagaaggtaaacctacgattgctaattttccaccacgacgaattgaagatagtgaagattgtaatgcttttggattccctgcagtctcccatgcaacgtcaacgcctacgttttcagtaatatttttaatttcattaagaggatcttgctctctgatattaataacgtgagttgcccccattcgttttgctgcttcaagacgcaatggttctaagtctgttgctattattgtacttgctccaaatgctttcgctgctgctacagccattaaccctaccggtcccattcccataatcgcaatcgttgacccaggctgaagttttgttctcgtggctgcatggataccaactgaaaaaggctctattaaggcagcatcttcataggaaagggaatccgggattaaaaagacaaaatcctgacgcatttttatatattgaacaaaggcaccatcaactggtggtgttgctaagaattgaacatctggacaaaggttgtaccttccctctttgcatgcttcacaatgtccacaggttactcctggttcaacggctacgcgatcccctactctaaatctttcaacagctgatccaatagctacaacctcacctgagcactcatgtccaaggataaatggtttttctactttgtatttaccaattctacccttggtataataatgtaagtctgagccacaaattcctacagccattactttaattaaaacttcattttcatcaatttgtggtataggcaatgtttcaatactgatttctcttgtgccgtgcatgacagctgctttcatagttttaggtaagttgttattcatcaataattttcctttctttaatagaaattctatataaatccataacgtaaaaataaatatgaatttactttcaactcataaatttctaatgcacttgactgttccttaaatatatttttattattatgtaagtgcatacattttagagttttttattacatgagctaattttacctgctaacatcacaccattaatagccttttatactgtctaaaagtacagtaacactgtacttttctttttatatacatacaaagatatagcgttaaaataaagctaataggaggtgtaagattctcatggctgaaattgaagatcgggaaacatttgcagaactgttatctttgggtgttaaagaactaaaacttcaccctgattataagattaaaaggaaaaaaggcgaagatagctcactaggacaatcttatatagctaatatcgcaaatgaactaggtgtatctcccaatacaattaaaagttggataggtcagatgggattaaaatatattcctggtcgtattgacgatggaaagctcttcggcatcatatggataatattaaaaaaaacggatatagatatcagttggttctcaaagctgatggaaacaacttctatacccactcttaaacctgctttaccagcttgggtatcttcgtgtctggaaaaggcaaaaatattaggggcagacaactcatttggtgcaccccttaataaagatattgaggaagtagtaaaaaaaatatttcataataaacttcagactgaagctgctactccaaaggaacattttacaatacataacttaccagcacgctggtcaggagtttttattggaagacactttgacctggaggcaattcgtcagtgggtaacttccccttctccattatgtttaatttccggatgggctggtattggaaaaacaactcttgctcttgaagtagcatatgcgtgtattcagaagaattatagggaaacagaaagccttgagatggattggccaaacctcaattctatagtatggtttagtgctgactggaagggactaacctttagtgattttctaaatacaattgcttaccaacttggacggatagagcaaatcaaccgatccattgacgagaaacgttttgtggttcgcaatgcattagctaattatgcaaaagaaaaacctgtattacttgtgattgatagcatcgatacagctgaaagtgaaatttatgaatttattactaatcttccacaaggcgttaaagtattactcacatctcgcgagaatctacagcaaaaatatagaaacaactttagagatataataaccattcaactaaagggactggaaaaggacgatgctcttaactatctttcttacgaagtaaaacaacatatgaaaatgtctaattcatcgaataaacaagaacaaatgaaacagttattaaatagccctcttgaaactcgtgaacaactcatttcagctactgctggaaatcctaaagctatcgctcttagtatagcttacattgcagatgatgacattcctgctcagcaacttattcaggaactaggaaaagccggttactcactgttggaattatttgattttcttttcggacgcacatgggagaaatgtaatgaagatactttacatctttggaaagtgttatgctttttcagcaaacctcctgacgagaaaagttgggcaacagcggctggactagacgctcgaaaattccattttgctgttgatcaaatgaaattatttgcgcttatccaaggagaacgtatagaaggaaaaatccattatctaggtcatcaaaccgtagtaacatatggtgaacaacgattgttagaagataaacaatttgaaaatgtagcacgtaagcgttggagccaatactatatccaatatttagacaactatttaaaacgggatcttccggattcgatttattggagttatttgcttggtcgtgatttagaggaaattaagaaagaatggccaaatatactcaaggttataaaatgggcaaacgaatccgatcaaaaagagcttttgattgaactggtatttcgcataagccattttctaagtcgaattaatttaccattaaggattaaatatggaaaaatagcagctgattatgcaaaacaacttagaaaacatacctatgaggcattttttagaattgatacattgggttgggcattgatggaggtcaataacctagatggttccctactacaaatagattccggtctaaagacactagatcagttaagctcagataggtctgatgtttacgatttgaaagcttggggacttgccttaaaagcaaggctcttgttgaagaaaaataatcctaacaaagcagaatgtattcttgaagaagttagggaggtcttcactacaccggtgattcaacatagaatttcattagtgcgaggtgatctatgtatggtctataaaaattatggagcagcaatccgattatatgaagaagctaatgaaatcagtttaatatatggaggagaaaagaccattgaagcttactttaatttaggtgtagcttatgtcatttgtgatatgcttgaggaagcagaaaaatgctttaatagccttctttatcagaaagacaaagccaaccaaattgaattaatatactatcactacgggatggcccaattgctattacgaaaaggagagaatatagaggcattacattctatccaagaagctataaaccttatcgattcttggggaccaaccattagtattcgaaaagaagtagaagaattcaatgaagttattaaacataatattagagagaattaagtaaaacagccacttgtatgaaacaagtggctgtttgtttgaatgtagtgcttcaattaggttgaaatttatctggcctcttatttcttccaagttgatcactcttttctatttggcttttattagactaacgcaattacatctatataaaaggattatgttaaaattactctggtttctccactagttgcatctgaaaaatttgagttgcttgaatacctcttaaatttgctcgtggtcatacttatagaattagttacacttttttgatatatatagcttaattaacggcttcaagggcttgtttcaaataatccatttcagaggttatatcatctatctgttggtttaactgacttactttatcaagagtattccgtgcatccaataaattaatttctaacatcaaacggcttgcttcactctcaagttccaatctctttgcaaataatacctcatgcttttttataatttcggattttaaatttttaatattgttttcttccatacttctacctcactaacttgtaataacagtattttattgaaatgtaaattcccctatataatttaataattacctacagggaggtttatatagcatggttaaaatcccctttttcacttacaggaaaaccacatttatttcgcatttacataagctaaataataagaaccaattaaaataaattccattattcactttcctcggatggtgttcataagttcttggtgttgacattcagatacatactgagcactcaaaagcttctctaactgttaaaaacaaatacaacattccaaaataagggaaaatttaaatcgttttgttttttttgcaggaaaagaaagcgcagtatataaagataacagtaggcatcaaaaagtgttgagaacattttatcatcattttctatcagcacgagagcaataatttgagaaaagagcttatatcagtccgtgtcttaagtatgcctattatatagaatgggttacttagtaaataagggaaggtgatttatatgttaggggaagaagatttaaaagtaaattgtatatcagctgctataggtttactcatccaacataatatcatcactcaccaggaactggacaaactaactaaaacgaattatcacgttttttatcattttctaatggataagctaattgaagaagagtttagtaaagatagagtggtacaaacataagtacttcaacaaaacaaaaaccgcaagattaaaagaaaagatctcctattttaaatgtgattcttataaggctccttacatattagacatatataatatgtaagggctttcttgttaaacaaacgccccctatagtttaaatgtatttcttcacaatctataatttttaaaagtcattttatcacaggaagcctgccagtattgttacaaaaaaagtcctcttctcttttcaggaaaggaacttatattcaacgaattttataagctacttccaagtctgatctagtttatctgaatagaaatgtaaggcttttttataacttagtatttcattgtcatttgtcgtatttagtaagcatttcagtaacagttccatcgctttgctatgttcttttaaattgtataaggtcatggaataaaacactttaattacatgattatctgggaacaattccattccttttaaaaatatatcttttgacttttcatattcccccaaggctctatatgtgctgcccaatcccaatattgccccttccatatccttagaaggtaatcctatctttatggcattttcgtaaaagggtactgccttttcttcttctcctaatatgtcgaagctccaagcacattgataattatataaaccatcgtctggaaattccttaactaattcacttagcaattcgttagattctttgtgatttccattctttcgtaacgctaatgctttatctaatttgttattcaacttaaatctccaacccttctttttcccactacttatctcttaacatccttccatatccagaaattgagcgtattcgtacactttatccagatctatttcttgctttaactatccttaatgtttaatttttaaaggctaacccattggcctgcaaagctgttctaagtttaggtaaagaagccggccccataccatgaaattgtaatatctctttttcactaaattttgatagctgctgcaaagaagttatctcgttgctttccaatgctcgtcttgctggtgctgatagcactgaaagaaatccattgtcaggtttgcgttcttgctcacaggttgggcaggtcggacagttactgcttttataatatttgtgtcctttatgacagattcttagatttcccttttgagttttcatttttaatctctccttttctcaagaattttttagcttttatcccctgtcacttctccaatggatggtttatgaaggtacaacacatgctacgtatagtaagctcattaccattaaatacgtatgagtctcgtttcagatagtgcagctccattacaaatcatgctaacaccttacatgtttgcgtttgaaaccaagccgtcctctatctatatccttttgaatgttttcggaagcaagaagaatactactttttttcttatccttcttaacttcgactggacctactgcctttgccgtttcaagcgccttctcatgaagtggcaaatatgaaacaccgactgtatagataaaattattcatagccgatttcgctcgatctggagaatcgtgaatcgtgttttccacttgattaagcatatcggcaatcttgcttgtgctaaattcatcgtcaggacgattacctaaaagccagcagtaacaactccaacctgccgacattttaagttcttcaccgcttgccacccatttatcagcaacaacttgcgcaaaatcggtttctgacaaagtgactgcaactacataatcggatagcatgtaaaaatacgctttatcaatccaacgctcaaaatcctccgcagtcatctctgttgggtctgcaatgataccagcaaaatacatagcatcgtaattgccagaagcgtaaagctgctcagctaaagcctggtttttcttgattttctttgcaatcggcttcatttttcctgttgccactccaaaaagcggatcgtgtgcaccattgtttatgtaagtctttttaattcgttccgtaccaagcgcttctagttctttcataaccatttcaaaatccatcgttctgtaccctccttcttctccattcgtaaactggatcatcttttctttttagttcagcttccaatttatcctgtaattcctaagctgcttggggatcagttcacctttcataatctgctttttatttccgccaaaaagttgaacagtctttcttatctaacatattaaactcaattatttttttaagtaattcatagtttactggctcagtccatagaattcgaaataggcctttggtagcgctgtatccagcctgggcaatgtcatcattaaagtgcgcaatccctgtttcttcaggtgaaacgctcaaatgatgtttcgctgaggcaaagccgatgatgaatgttccatgatcagtaaacattggcgtattccatttgatttgtggttccaaattcgggaaagtattagcaatccaagccaaaacttcctctgttcgatcacggtggtcagggctatctatacgcgctaaatattctgcaaaaacttccatagcattttctcctcaaataatttttttaatctactctacttttatacaaatggaacatcagtcagttcacttaaccttatttcatttttaactcaaatacattaacaatttatattagccatgttttaaataaaatgtactaatcatttaatccttttccattaagaatgttcggaatgcatttttcaactcttgatgctcgagtcttagattgtttggccgcagaaaaataaagaatatatgctctttgccgtcctggagtcaatgtagtaaaagcatcttttagagcaggtatttcatcaaatttatgctgtagctcttcaggaataatgagttcttcatgctttttgactttgacttttaatccggctttttccacctcaatggcctcatcaatataagctttcaagatggcttccttttcagctatttcttgcacattggtaaaccgaatttgtcgcgcgccttgtacattctctgtttgttgaattagaatactatgagaatcttgtaacagagcacctttaggaaacagtagcgcacagtattctttgaatccatgtattaaaacaatgttttttttctcaaacgtgtaacaagggttcatccatttataatcttcggtcaactcacagtcaagaacaatctttctcaacgtctcatattcttctttccactttttagctttacttaaaaactcatcgaccttaggatgcattttactatttgtcatcaaggaacactcctattcaattttttaatctgtctctctcgcaatcatacagtcaaccttcaattcatttaatggtgttactattcttcaaatgtaggaaatgcccttctacaattgacttgatagttattaaaattataaacattttaactttataagaaagaggctttcgtttatttatcaagcgttaccctttcaccagtctctgcagatattcgaaccgcatctaataattgatgaagtttaacagcatcgtggaagtttggaatttgacttttatgttcaaatatatcttttgccaacaccttataagccttttcaacgtaatcttttggatgattatcttttgctgaagatacgtttatctcttcaacatacacactttcagtacttaataaataagtaggatacttaaccttctctactttgagattaccaaattgcacgtgaccggatgaagaattctgggttaagcaaaaaacacctttttctcctctaatctctaattgaaaagcaggataaactccgccttgaatatgaacagcagctgaaatatcgccgttgagtgttccctgtattaagatttgatccgctgtatcctttgacaccgtaacttttgttccttgtatgagagcttctgtataatgcgtattcattatcgacgataactctttaaaatcacctaagatgtagcacagaacatcaagcgagtgtccaccgttgattgtaagaaggttcgctccattttctttttttaagatatagctgtttgcttcatctgttattccaccctttccttgtgtcgctacctgcatggtacaggagataattcttccaatttccccttggttaatagcctgctttacataattcacctcgggagattgtcttgcttgtaacccaatcgcatggtgaatgtccaccttatccgctaactttgccagtttaattgcttgcttagtatctacacctaaaggccactcgcaataaatatgtttcttttcctctattgctgcaattgaagcttcgtaatgaaacggaacttttacactaactactactaaatcaacatctttagattgcgctagtcccttataatctgtaaagctatggcaagcattaagtactctcgcactttccttggcggtttctgcttttgatgttccaattgcggttattcgataaaaagggctttctttcagtactggaatatgtgttttgctcgcccattgattatttaaagatccccctataattcctacttttattaatttctccttcattagacattcctcccacattttgtagaaaatattaccttttaatcaagtataattaaaatgaatcattattttaaatgttaaaatatgatagctatatcactttttttgatggagggtgaatatgaatggatattgaaaatatgaaagcttttgtttcagtggccgaattaagaaatatatctgcggctgcaatgaaattgaaccaccttcaatctaatatgaccgccaaaataaagaaaatagaaagctattataatcaagaactgtttattagaaactcaaagggcgttaaattaaccaagcaaggagaaaaattgtatcaccaatttaaaaaaatattgcttctttgggaagaaactgaaaataaaatgaagaaacaagatgaaaaactccgtattggcaccatgatatcagttgggggcactcaattctcaagcgctttaaacaaactttacaacacctatccagatctagcagtaacactaaaaacgggttcaaccgaatatatcgaaaatcaaattctacttggacaaatcgatgtagcttatacaattggatcattaaacaaccaaaagataaaatataaaaaagtaggcgtagaagaaatggttgtcattggtcgcgatattgatcaacacacgatatttgatgactatgtaagacaaaaaaatatactggtactttcagataagtgcttgtacatgacaatattacatactatttatgccagcttacatattgaacaaggtgacatgatcgaagtcagcgatccagaaacattagtacaatttgcgttaatgggcatgggaatttccttaatatctaagcgtatcgcaaatcgttataacatccataattttttagaagttccaccaccttatcggtacactgacttttatctcatttcccggctaaattatgaatttacccctatcgaaaaacagtttattgaattgaataacttcctcggggacacttttagaagagtagaagtttaatattgaggttacagttttttctgtaaccctttttgtgatttcttggctatcattgttttttatataggtacagtgaaagattttttcgctttacataaagcgtattcttagcagccatttataaaaaagagtaaatcaatgtttgattggctcttttttaatcttccctcatataaaagaagagatatagtacaagtaaagttgattatccattttttatttctatgagcttgaagacttttttcaagcagctgcttttgtccttcttccctttttatatcttctgaattattgagtgtagagttcaatgttatttctccttagaaaactaattttttatactttatatattggttatcttttctctttaagatgatagtatagtgggatgttcttaaagagaaagccaaatttaattaatcgttttggcaagcgcataggctgcttttacgctgattacaatatcctccaacaagctcattttctcctcttcttcaacgtttgcgtttaatagaaaaaataaagcatggaataccttgatgtcggtgcatataatgactctgtttggcagcagctcttaatcgacccaaaaaagaacattcgttccctacattatacaagaacacatgttccgttttcaataaaaactctaaagttttccgaattattcctatgaatagcgtcaaatttattattaaaaaagaaatactttatatacctaaagaaagatattaagataatgaaaataaaaaactatgagaaaatgttctccaaagcaaaatttcggaatgaaataatcaacaaaatttgcaataataagtgaagtaaggaggtgtattatgtttcgattgtatggagccttaattgggcttagtttaatttggggtttatcttttgtatttatgaagtggctgcttccctcagctggtatatggggaattgtattttttcgttgtttagcaggtgcaatcatcttgctcccgtttttatggtggaagcgtagaaaagttaaagagaaactcccctggaaggcgttgattgttgttggtatatttaactgtggtttggcgtggggattaatttccttaagcgaaactgagataaacagtacaactgcctctattctaaatgcgaccactccaatctggacaggtcttatcggatttattcttttttcttatcgacttacccgacgtcagtggatcggtattcttatcgggtttttcgggatactcgtccttatggattttcaatttggtcagattttcgggaaagggtttgtcggaattggaacaatgcttgttgcttgtatctgctatgggcttgctgggcagttaacaaaacggtttttgtctgaggtgagcgtactaactataacaaccttcaccttactaacaggttctatcatcggtttagttgggatgctgattaccgaacccttcaaatcagatttgttgattcatccacttccgattctggcaattgtgggtctcggttgttttggctcaggactgggtcagttaatctatttttatatcaataaaaatggtggccctgaattagcagcgacggttacttacctgatccctgcctcagccatggtatggggttatgtactactgggagagacaattactccaaacgtagtcgttggactacttattatctttactggcgtttatctttcatctaggaaatcaaaagggaaaacttcgcatgtcactcttgttagcaataaacaaaattaagtaagtagattttataatgtgagtctttaaaggtatctccgagagaggaattaagaaactgaaggattacagaatatgatatatttcaaatggaattcatcatatatgatgataaaacgaaattctagaatttcgtttaaaaggcagccctctatttggctgccttttttatttcaaggcagaaaataattttaaaattcactgctagctatcccgtacaacacaacatcaaacaaaaacgctgaatttatatatgtaacagatttgagatatttccacccaacactctgtctgcaacttctccactagatgtatgacgcttaacggcctgtagatttaaatatggatctccatatggaaagtccgaactaaataacgttctttcaggtatttcttttatagctaaagacaaggcgtatgttgtataaaatgcagatatatctaagtaagcatttttagtgtcttttatcatttctatcgtttgtagccaatgaattccgcccatatgcccgtatataaccggaacattttcatatttttgagtgagaagaaataactcttgaatatcctttaagttcaaaggataaaaagtatgtacccagataggcaaagacgtatagtcacttgctgctttaaatataggttctaacaatggaatttgacctgggccaagagtaaattctccgagacctttcatcctttgctctttgacaagcttctctacccaatcgtttagagtgacatcaccagaagaaaaagaaagtggaaccgaaccaaatccaacaaaccgattcgggtgctgcttaatcgcaacgattacttcttctagcgcctttaagcgtgcttgtacgggattcacctcattatttagaatttgatttagtttgttcatttccgtggtgaattctttaacgttgctgcttttttctggatgaacaagagtagaaaacaatacggttttatctattccactttcatccatcattttaatatgattctctataggtaaaaccacatgtgcgtgactatcaataatcattttgtttctcctttttgtttctttctgttctttcagaaaagacttcattggctactgttaaaatcgtatttaaagctacagggaatccagcataaatgaccatttgtaacattgcttctaaaatttcttcctgtgtccacccaccattcaaagccccgtttatgtaaaatttcagctgtttcgtattgcctaatgcagttaggccagccactgcggcaagaaggcgtgactttaagtctaagcctggtctcgagaaaatttgtccataattaaactctacagctaacgttcctaaatcagggagagctgactgttcaaagccagccattatgtccttatagttctctggatcaatcttagctaatatatctaatcctcgttgaaagttatctgtgtgtgttctcattacgtattacttcctttcttattcatgaaattccctatcgtttttttagggatgcttattggaattaaagaacaaaagctaatggctatcatcaatatggctatggcacacactccatgccactcccatttactccatgcaagtaaacccacataagatcctagggaccctcctaaaaatgtggaaaccatatataatccatttaatcgacttcttttttcttctcctaattggaaaatagtaaactgacaggcaacttggtttgcttgagttcctatcgttatgagaagagctcctaaaattaacccaggcaaccagtaccctccccttataagacctataaaggcaagtaaagatatggacatacacaaaagacttgcaaactttgccccttttgtatcaattaaacgtccgataatcggcgtagcaaacgctcccgctatcccgactaaccctattacccccaccatgtcacttccatagaaatagggatctgtatctaataaaaagacaagcgtggtccaaaatgcactaaaagaagcaaacatcattccctgacttacgcatgcttgttgcagggctctttcttttataaacagcggacctaacgacatgattaagtgtttataactgggtgcattcgctcccttactttttggaaaatagacgtaaactaacaaaatcataaaaagtgtagccacagcagacgtccaatacaccattcgccacccaaaatgaacatcaataaaaccactaacaagtcgagcgcctaaaataccacaaattaatccaatggcgacatttcctaaaacttttcctctattatgacctgaagctatattcgcagccaacggaacaataatttgaggaacaaccgttacaattcctaaagctaaacttgtaaccagcatccacgttttgttgatagataaagcgtttaaagcgagaacgatacatatagcgaataataaaaacaaaatcaatttttttcgttcaaagatgtctcccaacggtactatcaaaagatttcctagtgcgtatccaatttgagctaaagtagctataatgcctatgctggccgctgaaacatgaaaactggcggacatgcttactaaaagggtttggttcaagtagacgttagccactgtaaacccgcaaactgtagccattaaaagaactaatccttttgatatatcagacgtcttttcgctatcttttactatcatctgtttcacctcccttacctagatcataaaataaggattataatggtaataggagtctagttatactagcagtaaaagtactacctacacaaaggagtaaaatcatggtaagcgataaagaaagaagaaaagaattaggagattttctaaagataagacgagaacgattgtctccaaaagattttaatttgcctattggaccgaggagaagagctaaaggattacgcagagaagaagtgtctcaactagcaggagtcggcataacttggtatacgtggctagaacaaggacgagatatacaagtatcttccgaagtattagaagccatatctcgtatttttaaattaaacaaagaagaaatggagcatttattttcattaggcaatcagccgcttccgtctgcaaccgtgcagaatgaaagagaaaatatagatcgtgttataaaaaacctattaagtcaattaggtcactgccctgcctatgtaacagatgaaaaacttaatatcgtagactggaataaagctgctgtggtggtatttggggactttaacgagatggacgagcgaaaccgcaatgcagtgtggcgctgttttacttccaaagaatatcaaaacctttttcaaaattgggaagatcatgctcaacgactaattgcccaatttcgcctagcttacacacgctttgtcggagatgagtggtttaaagctatgattagtgaacttagcgagaaaagccctcagttttacaagtggtggtctaatcatgaagttttaggtatgccttgtggaaagaagacaattattcatcctgtggtaggagaaatgattatggatcatatcacactccaagtgtatgatgcacctgaattaaaagtaaccatttatcaaccttgccaagaaaaagaaacagaagaaaagatgaagcatttactgagatcataatattagtactatacgtatcattaatgttaattactagaagcctatgtaatcttgataagtacataggcttctttgcgtttttcttctaacttatttcatcaaaaacgttcgtaaaagtatgtgtgttttagaatacgttcgtaattaatttccgaacttaaatgaacggtaaaaatgatagttttattatctaaatgaaaagtccgtaaaagtatacttttacggacttttattggttcttgtaatacttattatggtaactacgattatatatgatgtttacactgataaaatcttaatttgtggtaatattttctataaaggaggttaggtcaattgaaaacaataggcttattaggtggaatgagttgggaatcatcaagcgagtattacagaattatcaatcaaacagtaaatagaaagttaggaggacatcactctgctaaaagtgtgatgtattctgtagactttgaagaaataaagaaattgcaacatagtgatagatgggatgaagcaacagagttaatgattaaaggagctcaatatatcgaaaaaggtggagccgactttttagttatctgtacaaacactatgcataaaatggcaagtgatattcagcaacacattggtattcctattttacatattgcagatgccacagctaagaaaataaaagaccaagggattaatagagtcgggttgcttggcacgaagtttacgatggaagaggatttttataaaggtcgacttatggctaatcataatcttgaagttaatatccccagcgaaaaagagcgccaaattgtacatgatattatttacaaagaattatgtttagggaagattgacttaggttccaaaagtgcatatcaaaaaattataaatggtttaatcaacgatggaatagaaggagctatattaggttgtactgaaatctccttactaattaatcagaatgatatctggatacctatattcgataccacagaaatacatgcacaaacagcagttgattgggcattggggatctcctaagaaaataagtagatgaaaaagagactaagtaccatattcctcagaacaaaggcttcctagaaaatcacattatgtaaacttacttgtaataaattacgattaataacaaaaagaatcctttgcttctatcagcaaaggattttgaaatttattggaatagggggaatactttattagtctggccagatttgtagattcatatacatatatctttaaaaataaagtctgtattttataattcaatttcctccttttgtagttaataaaaacaaaccatacctacttgggtatggtttgtttattatttactttcattctaggaatattttctagtcaatcatagaatataaataggtaaaaagggttgattatagataaaaagggtacttttaaagtaaaagtgagggatagtcatggatatacgaattcagtctacagacatagattttcaacagttaattgaatattcccttaattctattttgattattgaaaaagaaggccacattctttactgtaataaggtatgcttgaatttactgaatgtagctactcacgaggaagtcctatataaaagttggtatcgttttttacatcctgacttccatgacgtgtttaaagaacgattaaaaagggttttggaggaacaggaagcagcagaactcatagaacaaagaataataagaaatgatggagaatttatagagatcgaagtcatgtctgctccttattacttaggtgatgaagtctttgcacaagtcattattcaagatattacccatcgtaaattagcagagaagcttttaaatgaaggagaaaaactctcggctattggtcaaatagcagctagtattgcccatgaagttaaaaatccccttacaacagttaaaggatttttacagttattaaaagaatctcgcccccattcctatttagatataatggaaactgaattagaaaaagcatttaacactcttcaaaatttattacaggtatccaagccggacttagatgacgaaccttttgttcctatcgatatatgcaaagaattagcatctctcttattcctctttcaaggaagactttacaacgtggaaatagagatggacgcaatagattctaagcgactgataataggaaagcgaaatttattactaaaagctctttttaacctgattaaaaatgcattagaagctgttgaagataaagggaaaataaagattgaacattactttgatgagggatacattcatataaaagtgagtgacacgggagtgggaattcctgaagaacaattaaaacaactgggaaacccgtttttttccactaaaaatgaaggaacgggtctaggtcttactcaagtatttgccactatacgtgaacacagaggaactatctcggttcaaagtattgtcgggaaaggaaccacttttcatatcaaacttcctcttaactaaattattttgaaatgctgttgtgagcgtgttcaagttacagttcctttaacgtattcttttagagaagaaaagggatcaaagcaaacgtatgcgggatttggtagttgacgataaagatgtaccaaattccgtgtcatactgacatatcaaatattgtttattccttttacttacttaacaggggaaccttgtatcaatagtaattctcttttatgctggtttttaaaaagttatatctacattattaaaactcaaaaggatattcgttaatgttgagtcattaatgaatgttctcaagccattatctcattccatataatatttgattaaggtacttgtcagaggcaaacctcttctttttatttctttttcaagaatgagaatgaactctctttctaagtttaattttatagccttatcataggatgttagtaaaagttcatcgaccaaattttccatgttattacccctttcctgtaaaagtaatacatattttcgaaaaattcttaatgaattccgatttacaaataacccctaatttatatctattttgttccctctcttttttttagcaaactttgttttagaaggtaattttgtataaattccacccaaattcgacaggaaatctcccttatttctatttatttgtgactgctaaaatagcatggctctttctcacttttggtgaaggtaaacgtcgctatatgtcaaagacatgcattattttttcagaaaaacaactctacctataataatggtatgagcactcgttttttcaacagctcatcacttgnnnnnnnnnnnnnnnnnnnnnnnnnnnnnnnnnnnnnnnnnnnnnnnnnnnnnnnnnnnnnnnnnnnnnnnnnnnnnnnnnnnnnnnnnnnnnnnnnnnnggctctttctcacttttggtgaaggtaaacgtcgctatatgtcaaagacatgcattattttttcagaaaaacaactctacctataataatggtatgagcactcgttttttcaacagctcatcacttgcccgaccatacatcatacgttttaacatcttcacacgatgtatatgtccttcagatagcccattacttaaaggatcaacacaagcagccattaccccttgtaaatctttttctatataggttataaaggtatcgagagctggaaacgaatacattttacatgtttcaatccaaccaggtatgccttgattactacgtttactcacgatgtttctaaatttacgtgtcacttcaaataattgtggtattaatggaaactcttttaaacatgccgaaggtaatgaatctaaccagtttctattcttttcactccatattttccacagtagggaagctctagacaaagaatgcgttgtggcactggctctatattcatgacgaattctcgaaacggcttcatttaaagtagagcgacatcctgtatagcctatctttttaagttctgcctccatacgactcgtcgtccacccagataggttccattgacgtaattgatttaggaatggatctaatagtcttacacgactaataggctcttttttcttgcgtcttaaatctttatagaccgtattacgtgaaatatgcatttgacgcgaaatccaagcaatggatttccctttttctttccactctttcacttctaaggcgcgttgccaaacttgctcagcatactgatggcgttgaacatctgtcttgcggataataagtggttctgttgtaggatttttatattctgtttttctccatatagatggaaaagattgttgtaaggtctctcgaattgctgtaaataaacctttcagaatatgccaacggtccgtaatctgataagcatgaggcagcgcttgagagatagccttagcgtatgtgaaagaaccatcacgagtcaccgtttgaatcgttggatgctgttcgagccattttacgactgtttctttatctctcccatttaaaatagcgatgggtcttcgggtttcttgattgataataatcgtaccgtaacgacaacgcttcttaaatgcaaagtcatcaatcccaatatgaaccggcggttcataagaaggcagcttcaatttatgaagcaggcgtaaaagcgtatgatgactggttacaatacctagatgcttagacagccgagatgctactttgcagctcgtagatagtgcgattgactttaacatctcttgtaaacgtttggttttgcgttgataggtccctaaccacgtaaatctttctgtaaaaatagcttgtgggcaactacagtcatcgcaaaaaaacttacgtgtttgtatctttatatatgttgttttaccatacgccggtacatcctgaagggatcgaacatattggctatgaatacggtgagatagagtatgacaagacggacatatacaagaggaatgtttagattttactagatacatataagattgatcttcttgtataactcgtaagcattctatattagtgaaagaagaaaaaggcatgttgagattcgctcctttttatttcactatatcatctataaagcaccttcaccaaaagtgagaaagagccnnnnnnnnnnnnnnnnnnnnnnnnnnnnnnnnnnnnnnnnnnnnnnnnnnnnnnnnnnnnnnnnnnnnnnnnnnnnnnnnnnnnnnnnnnnnnnnnnnnncaagtgatgagctgttgaaaaaacgagtgctcataccattattataggtagagttgtttttctgaaaaaataatgcatgtctttgacatatagcgacgtttaccttcaccaaaagtgagaaagagccaatagcattaacactacacgctcgaatagcgtgaacaaaaatgctgaaattcgtgaacacttccttaaacaataatctatcacgtaagataaagatacgatatttacgtgatggaggatggaaaggtggataaatggaacgtgtacatgaatattaaacgcttaagaaaacaaggattcacaattactcaggtagctagaaaattaggcatttcgaggaataccgtgtataaatacatgaaaaaagatcctgaggaaatggccttatggatggctagttctcataaaaaaagtagaaagttagatagatataaagaggttattttaggttggctggaaaagcattcagacttaacagctgcacaaattcaagactggttaaaagaacagtatcccgacgtcaaagttggtgatagcacagtgcgaatgtatgtcgcatcccttcgggatgaatacggtatttcccgaaccgtgcctacgcgacaatatgaagccattccagatcccccgatgggacagcaagcacaagttgattttggaacatgtaaagtacgaaaaggagaaaaaacaacagagatacgtttatggttcatcacattcgtattgtcacactctcgttttaaatatgtggaatggttagacaggcccttcacaacaaaggatgtcattaacgcacatgaacgagcctttgaatattttggaggaatgccgaaggaaattgtgtacgaccaagatatcttaatctcggtgaatgaaaatgggggagatattcagctaacagaagcgtttcaaggatatgtcacctatcggaaattcaaggtccatctatgtagaaaagcagatcctgaaagcaaagggaaaattgagaacgtcgttggatatattaaaaagaactttgccaaacaccgccctttttataacttagaaaaatggaacgaaaaaagcctgggatggttagagcgtacagccaatcgaaacattcataatacaacaaaaaagagacctattgaggtacaccaactcgaaaaggaacaccttcaatcgatctctttcattcagaacaatcttagtataacaaggattgtacgtaaggacaataccattcgatttcgttcaaatcgttattcagttccgattggaacatacaaacctacagaagaaaccactgtataccttacggtcacagcagaacaagagttgattatacaaaaacagagctcaagtgatatcattcttgccaggcacccactttcactagacaaagggaagcttattcaacaccgaaaccataggagagattggagtaaaggcatacccgaatggattgataagatgagccaacaatttgaagattccactcaagcctatgaatatctagagaaagttcgtcagaactatccgagatacatccgggatcagcttcaaattatagaaaatatccgtacaaattatcctacaactatccttacacaagcattagatctttgtatgcgtaaaaagctttatagtgcaaatgactttcgtgatgtgattcaggtactcacccagagaaaccctcaacaattaccatctaaagatactttttacacaccaccatcgattgaaacacaagtccattcatctataaaagcagacacaagacctctggacatgtatgtatccatattgaaaggagacgacgaatcgtcatgcgtataacaaatgagatggtgcagcaaaaactagcagagttacagtttaaagaggtctcagtttctctttcggaatttattcatacgtctgaaaaagaacaagattcatatcaagcttttttatatcgtattttatcttttgaaactaagcgccgagaggataacaaagtactaaaacgtttaaaactagcctcttttccctatcagaagacattagaagactttcgaatagaggaacaacagtcattaagtaccaagcaattaaatcagctgcgagagcttacttggctagaacaagcatataatcttatccttttaggtccgccaggtgttgggaaaactcacctggcaatcggattaggaatagaagctatttaccgaggatataaagtgatgtttttagcaatgggtgcgctcgtacgagcgctaaatacacaggatattacgagaaaatcacaaacaatagtaaaacgtcttttaaacgcagacttagtcatcattgatgacatcatgtatatggcgatggatcaacaagaagcgaatctcttttttcattttattaatcaactgtatgaccgaacctctattgtgtttacatccaataaaggaccagaggaatggggagaactgattggcgatccgggtattacaacagctatattggataggattatccaccgagtagaagtcattcatttaaatggagacagttatcgcatgaaaaatcgttctactatctttggatcaataagtgttcatgaataattagcacggagtgttcacgaagtcggctctttctcacttttggtgaaggtgctttatagatgatatagtgaaataaaaaggagcgaatctcaacatgcctttttcttctttcactaatatagaatgcttacgagttatacaagaagatcaannnnnnnnnnnnnnnnnnnnnnnnnnnnnnnnnnnnnnnnnnnnnnnnnnnnnnnnnnnnnnnnnnnnnnnnnnnnnnnnnnnnnnnnnnnnnnnnnnnntcattcatttaaatggagacagttatcgcatgaaaaatcgttctactatctttggatcaataagtgttcatgaataattagcacggagtgttcacgaagtcggctctttctcacttttggtgaaggtaaacgtcgctatatgtcaaagacatgcattattttttcagaaaaacaactctacctataataatggtatgagcactcgttttttcaacagctcatcacttgnnnnnnnnnnnnnnnnnnnnnnnnnnnnnnnnnnnnnnnnnnnnnnnnnnnnnnnnnnnnnnnnnnnnnnnnnnnnnnnnnnnnnnnnnnnnnnnnnnnnttgatcttcttgtataactcgtaagcattctatattagtgaaagaagaaaaaggcatgttgagattcgctcctttttatttcactatatcatctataaagcaccttcaccaaaagtgagaaagagccacttttatttagcagtcacaaatgtttaaaaaacgctttaatttaataaaaagaggagccacttttggctccttttacttttttaatgaaagtccacatcaattttttttgtttcatcttttgctaatttaggcattctaacttctagaactccatttttataagatgcttttgtcccttcgttagagacagaacttggaagatgcacagaacgatgaaaacggcctaaaaaacgttcttttcgatgcatattttcctctttgacttcatttgttcgagtggtagatccactaatacttagtgtattgttttccactgtaacattgacatcttctttactttgcagccctggaatatcacaagtaaccacaacttcattctctgtttcatggacatctactcgaatttctccaaaatttgtttctgtccccagagtggaagggaaatcagaaaagaagcgttcaaaatcttttctcatattagatagttgtctaaatggatcatatggtacaagtgccattgatacatcctccttctttcttagcatgagattagtatggctcctgtttagagaagttattcaagttcatgtaggggtaccgccagcaaaacgcatatttacaacgttaagaaaactattgaaaagttcaatttctcagcataaaattaagaaattagatttttttgttactctataaacacgctccattcttaaataagggctaatttccccatgataaaaaaagctaatcgaacattgtcgattagctctattttttagtattgattcgcttttttaaccattttgcaactgtaactatacgtttaattacaacaataaatatgtctgtttcatatttattattcaactttccttattctaatcaaaacaaagagacttagggcaaagaagattaaggcaggcatcattacatttataccttgaccagctttaaaatgtgaaaatacagcgccagccatcagtaaagtaagtcccccagaagctaataaagcaattcttgacttccagaaaccaaccaaaagtccaatagcccctacaatttcacaaatacctacaaaatacatcaatcctaatggataaccaaaaccttcaaatgtgtgaacttgcataggatttcctgtaagtttcattgtaccaaaagcgaaaaagccaactacaagtaatccttgaataatacgtaaaacccatttcatttatcatttctcctcttaatctttgtcttttatttttgtaaactttgtgcaccaattcctattttctttaataaacctaccagttgttctttctcttcattgcttacaaatgaaaaattttctgagattgttgtaacgtgctgggcaaacatttcactaaacaaaacttctccgttttcagtcaaagtgacattaaacgccctcttatcgtttggatttggttttctttctacaagtccctgcttttcaagcttattcacgacgtaagtaatgcttccacttggaatagatagcgtttcactgattttttgaataggatgagcacctttgttataaagcaattcaagtaccataaaattttcagggctgatactataactttctatatccttccgaatattttcaaatacagccttatttgctttcatccagattcgaaatagccttaaatctaattggctcttctcttgtttataatccatgcaatttacacctctttgaagttggaatcaaaaacagaaactatctatcttttggatacaatggatactcgacttgagttggaatttctataaacacaatgcgaagactatctcccttaggcttgattgtaatggtttcagttttctcagattgaataataataaaatcttttttatcaaaagagagctcttgctgcacaatcttgcctccatcacctcttatagctagtcctgcaatggttcgatttggagtaagtgtaagctgataacttgagctattagaaatttctatatcgtacataaaggcatctgttatcagattaattggcgaatcagttccaagtatagttttaatggttacaccctctccttgaatgacaggaaattcctcgtttttatattttgaatagtttggtgtacgcttgattgcatcatttaaatatggttcaagccatatttgaaacatttctgcagggccatctgatccttcagcatgccacatgcctgaccctgtttgcataagttgtacacctccagcgtcaacctcgctttggtttcctagtgaatctttatgaaaacctttacctgacaggatataggttaaaatttcaaacccttgatgagggtgttcgccaattccacctgctccttttgcttgcccccatgcccagtagaataaaggaccaagtcgactgataacagatccttcaccagaaaacccaatgggtttttgttctataatcttgccaccatcaaattcaccttttgcctgttcacttgtatgaatgattttgacttccattattgttcctcctataagttaaatgaatgaattaaaattgaaacctaacatttcaaaaatattaacaaatataatggtatgattattagctgtttttgaaattatcgcatttaccctaacattaggataaatccgtgtcaacaaaaatattccctatttttgatggagtgtctactgtcaaaaagcacacctttttatacggtaaaaaaacgaatgataaaacctctatttaatctaaaaaacaagccttgttagacttattaaaaatacaaggccttattgtacgcttggtttacgtctcttcctagctgataactctcagcattatttttggagttagaaatagttgtttaattcagaaaataattataggaatactcatttcggcatacttcgacatccattatgtagtaatattttatataaatatacacattcagataaaggcaaactagttgaaaagctaggacgcaaagctacaggtctaaagtcaattgactatgacagctgagcctcctgaaaatctggaggaatttatgtttatggacagtaaaaattcttgtataactcgtaagcattctatattagtgaaagaagaaaaaggcatgttgagattcgctcctttttatttcactatatcatctataaagcaccttcaccaaaagtgagaaagagccacgaagtcttgacggtcacatttattaaagagaaatacctataaatttaagatcaaaatggagaataacagaaaaaggtgtagaaagaaattttcattaagccaggtgcagtctccttacttctccaagaattcttttttcaattggttcctgtaacagtgattatgtaaactttaaaagtggattactactcagtgacttctttttccacagtacttattattctatacaaagctaaagatgtagtctccacatccggaaaatattcaatatggcccgtttcnnnnnnnnnnnnnnnnnnnnnnnnnnnnnnnnnnnnnnnnnnnnnnnnnnnnnnnnnnnnnnnnnnnnnnnnnnnnnnnnnnnnnnnnnnnnnnnnnnnncatccaatatttaccttgtattctttttttgaacaaaaggaatcttaaaagcatacaaggaggtgaatcaacatgtcaaacaacaacagtggtagtcgtaatcaattattagtacgtggtgctgagcaagcaatcgatcaattgaaatatgagatcgctagcgaatttggtgtaaaccttggtgctgaagcaacagctcgtgcaaatggttcagtaggtggagaaatcacaaaacgccttgtagcaactgctcaacaacaattagctggtggcttttcaggacaatctggaacttctcgctaataactcgtgaagaattataaaaggttagataattaaataggtcttgatggctttggctacctacatttgtaggtagccttattgtttttaagaaaacatctcttcacacttgacgccttggttataaaaacctttctcattttagcagacaatttaaaaggtggactggtttaagtcctacagaatttcggaaaaattctcttctgtattttttctaatatttaacaattatccataaatccgtatactggaaattagctctttcttttagaataggcataattcctatttctaaaaaagattgtagcaataaacaatagagaaaaggagtatggaaagttcactctttctgagctttccatactcctttcgttatttgttgaagtaaatctaataactaacttttagtaatgtaggttctcgtaattatgcttaatgatgacaaataacgattttttcttcaacataaacagtagttaaaaagtttatcattcaattaatgatataaattctccatatgttcttccttttgctatctataaaattaccccatctttctccttggctaatataatcattaaacgtagcattcttcattacaatatgacctccacatttatctgccaattgcttagcagactcttcatcaataggaaatgctaacgattcatcattagtaaattcgtaactggatacctctttcttttttacgttcttatacgaatggtatacgtaatataatttacctacctttataaaatagtatgggtaatctctgttaggcaacttacttccctccattctatccccttaaagcccctataatggaataactgtaaagataatgaagtttttttaaaagctgcgtttccctgcccaagctccctgcattttacttaggaatacaatttgcccaatatgatatgcattgtgcagtgctaaactcttcagttcaagcactaatgacctttctccagggatctgtctatataaatcttcatgctctgattttgctagtattttttcaagttcacgatgaacataaaagtattcttgctttgtttccttccaattttgaaacgtctcagttggtaatcgaaatgtagattcattatcttctgcctgtggttcattcgctgtttcaccatgaaatcgcatcagaagtctcttttcatagaaaagtaaatgacaaactaattcccaaatggaattcatttctccatcaactggtttccaaatagcctgttcaagcgtagtaccctctagcactttttcaagtggtggaaaccagtcctctttatctaagcagcttgcccattgttgtaacagaagtatctttacatccattttctattccctccatttctgaatccttcaatcgctttataagtccctattactatcttacatggacttaaaaagataaattccttctacgccaaagggtttcctttttcatgtgttccggaaagcgagattatggtaactaacagtgtacgggagatacactgtgcgttgattatcaaaaagagataacaatttaaataaaaggttatcccacgattatagagaaaaccttaatatgaaaaagaatagatatagaaattatttttatataaggaggatttatctatgaaacaagctttacttattattgatgctcaacaagaattaattgatggtaacaaagaagaggataatgtttttgataaaaaaacattgttgaacaacattaacttaactattgaaaaagcactaatctcaaattcaatgattatttttattcgggataaagatgttgcttctggtcgaggtgatggatttcaaatacaccaggatattaagatacctaatgaatcaaaaatatttgataaggaagcaacaaattcattctatggaactccattgttgagctatttaacagaaaatgaaatagaacatctagttattatgggatgtcaaacagaacagtgtatcgacacagctgtaagaactgccacaatcaatggttttgatgtcactttagttcgagacggacactccacaaaagattcctcaactttatctgcccaacagatcattatgcatcataatgaaatacttgatggtcattataatgttgaacatttttctgatgttaggagtgctcaagaggacttatttcaaccacggcataataattaccgataacacgttttatgtaaagtagctctgtatattaattgttttttttctttcaaaaaggggaaggaccaaataagatcatgttaattcttagagttaacagttttcccctttttcaacctatttcgttggatataggcgccataataggcgtctttttttttgcacaaaaaaggcaatctactacgttttcatgaatatagatagaagaataatgaagaaagggaaggtgtgagtgataagaaagttatctattcctatgttaatcttaatgatactatggacaattattctttgcctagaaaaacaagttactgtggcctgttttctatggatcgtttatagcgccttacagttttttcgaagggcataatttttatcttctaaataaagatttttaggaaagtatatgtatcgtacataagaggatttctaatagacttttgacttcctttagccatactacaaacttaacctccttacataaacaaaagacactggctcttaaccagtgtcttttgtttatcatttcattttatccgcaataattttatagaaatgtcattcgagtaaattattagacgcttttcagttcccttggatctgttactttatttttgtatttcttttcatatttattaaacatggatatattcgctagtactcctacagcaaacataagcaatgtaagagaagaaccaccataacttacaaaaggtagcgttacacctgtgataggaagaaggccagttactgctcctaagttaacaaatgcttgaatgccaatcatgaccgaaataccgatagctaataaggcaccaaaaggatcgttgcatcttcttgctatttttaggccttgcaagataataaaaaatagtaaccctaatacaagcagtactccccaaaaacctaattcctcagcaattaccgccataataaaatctgtatgagattcaggtagataaccggccttttgaatgccttgtcctaacccttcacctgatagtcccccagttcctatagccaggtaggaattaaccaattggtatccatctccttgctgattcgcaaaaggatggagaaaaccagtaaaacgagctaaacgaacaggagaaaaaacagtagccatctgtcctgttactaataaaacgattagcataatgattacacctattactcccaataaagcaatctttagcatggattttctagagatacctgaacataagacaatagctgcaactgtgcctaaaataagaagaattccaccgtaatcgggttgtaaagcaattaagaagcaaataaaaaatacgataaggataggtggaataatagcgcgctttaaatcgttgatatactcttgtttattcgcaaaaacagccgataaatatacaataatcgttagtttcgtaaattcaagtggttgtattctaatcggacctagtataagccaactctgtgcatttcccgcggtatggccaaaaataaggaccaaagcaagaagcgtaattactgttattaataagatttttaatacttttttctctcgataaattttatagggaataaaggcagaacttttataagttataatgtaatatgaggagtagtgatgttagtatgtattattacggcaaaagaaatcaagaacctttagctcaagaacaaacagaggtttgggaatgtacagtagaagattgtaagggctggatgagaaaagatttctcttacgacaaccaccaaaaatgccctttgtgtggaaatcacatggaagctggagaacggcttattaataaaatcccccttaatccccatcgaagataatttgtaccaatgctatcgcatagattaaaaattactactatattatttaattgaaaatatagttaatttatttgcatttgctttctatttctaatgtatgttataactagttataccttgtatcgatcgtcttgtctaaaacccaggcttttttttaaagcctgggttttctattgaactaatagtagataaatcatggttttctaattataagaccataaaaaaagactccttcataaggagtcttttttgttatcacttttaattatgctttgtgaacgttagcagcttgtgctccacgttgaccttgctcgatatcaaaagtaactttttgaccttcttctaatgatttgaaaccttcaccttgaatagcactgaaatgaacgaatacatcgtctccgccttcgatttcaatgaaaccgaaacctttgtctgcattaaaccattttactgtaccttgtgtcataatgttgcctcctgctgtggaatactccacaaatgtattacctttcttgcccaatcatactatttcaagataaaaacttctgtttaaggttttttcttctctcaatcttataccgaacaaaaacaagttaaatgtagtgtaacacatagggatgtcgatagcaaataattgctttattccatttaaccgttataatcatacttgtctacggactaaactaaacagtgagaaagaagtgccattatgagaaagttaaaaccctcttttcaaaacctagtcaatgaaaatagacataaaatactagaagataaaaaggtcatggaaaagattgaagaaaaaattgaagctcgccaggagcaggctataaagatgaaaacgaaataagagtagaataaaaacatcctatctaaacggatgtttttttgtattttactactgttgcatttctaggtaaatggctttttacaggatatttcatctgctatgtcgaatctagcaagtcacaagaaaggggctgttaatatgaattcaaaagaacaaaagaggttggcaactactagaaaacaaatggagaatgctaaagaacaaattgatttatcttccgagttagaacaagacttggaaaatttaggattacaacgacgaatgaagcaattagagttagaaagcaagtttctaaaaaaccagaatgatgaactactttaattcacagcacccattcaggggtgctttttcaacattttaatacttttacctcagcccccctatccatgatcaatactttctcccagagcaaacgaataacaaagatggtttattctctttttgtctaattcagctctgtctatctatgtatgttttatgatgatcttccattaatttctatttactttaaatcaacgtgtttcatttccaaaataaatctttgatggtccagattacttgatctacaaaggttaattcacgcttatatctcttccattccttctcatagttaacctcaatatgacatccaaaaaaaagagctaatcgtctagttgaaatatttttataatggcttctttatgcttcttcataaattatagtattaagacacaacaaaatttgacaaaataaaaaacttaaccttatcctatacttaaagataaactcaaggagttgagttataacataaatggataacatgcagcgctttatagagttagttttacagtttgaacaatccttaaatagaaagctaactaatcaagaaaaggaattcctaatgtgggttgtaaaaaaggaaaaacagatagaagcgtaattctgaattaattactcctatctgttttagtaatgaagggtagagcccttcttttcaattcttcttcgagaataagaatgtttgatcatgtaatttctcctttacctgtacaaaccctcccataacaagtagctctaaatgtgttgtattatcttctatcccaaaagttttacataattcatatcgaattttcacaagtcccaattcgtctaattcccttacaatacctgttctttttattttatctgaattaaaacctttgttccactaggcaattgatcgacgtgataagatatcaaagaacctgtgctccgattatcagcaggcttagcatactcaatttctacacctgttcctccttcaccacaaaatgtcattgaaaattctcttctatcataaccttacttaataggaagcctctttaaagattggcttctgttctcttctgccccatcaggattaattgtacaaatagctgacttacccttgttaatggcatgttcagtatgcgctgcggttttagagtatttatcagtcggaaaatagattactttatctatcataggatgtggtactttcttgtgacgaagagaataaatcctttaagtcaatattttctacgtcagtcacataagctaaaatcaacaaaataaaaataatccagtatatgatttttttcaattttctcaactccttcactaaaaatagtagtatgagaaacactcagaattgcaattaatggacaatgaccctcgaaataaagaatatcttcttctggtagattctcaataacaatatttcaacacttatgcaccagaatccccttaactatgtatagctaatttatgattaaggttttccaatatagatagccccaaaaagtacacctttttggattggggaaaaatgacttaaaaaacagctatcccattcgaaaaagtatactttttcgaatgggatagctcattaatctctatattttttgtgttttcttgtaattttttgatatgttttgtagaaaccattttcattctatcttatattgctcataatattttttattggctctatctttttattatagacctactaaatttcctagaaactgaaaaatttcgatgaggtgagaaaaagctatgtcaatgctaatcaattcagtaggtcaaataaaagacttacgaaagtacattgcaaaaaaaaggaaagaattaattgatctaggtagtaattatggacttttagataaaaaaacaattaagtgtagtcaagatttggacaagcttataaatttgcatatgaaatcttattctagttcaactaacatgtttttagattacggaggagatctacctagaatgagacactcctatagtaattataaaattagtgatttcaaatatgaggtaaaagccgttgagcttgcaagaagtaatattcgtttttgttctgcccaattgattgctcattcaaatctagcaacatttggagtatgtactgctttagttctagttgataatggaactaaagcaggttttgttgcccttcaaaatttacggaagttaacaactcgttcgtgaaaatctatcttttataacgctttaaactaaatgtataaatacttaaaaaacatcagattagaaaaactgatgtttttttaagcactttaaactcagaaactgatactaatttaacttttcctcataaatcttgtaactcaatttcacaagtaccattgttatataaccacaaaacagtatacttttttctttaaatataacattacaatcaacctttactaattatcctttcaaacacaaggttttctgaataatcctttaaggatactaattcattagtgtcctttttttttgagaaaacagggaatcttttaaggctcgtcgtattaatagggataaagaggtgattgggttgacacaattaattattaatgatgttgaatttaatgttgaaaattttgaagaaaaaacaattacacattcccctacaggtgagcagctaaaaaagattggttttgcattttcggttataggaaaaaaagattataacttatatgacttctttttcgagagccccgattttgagcttactattgttgatacaaatgagaaactcaaaatgaaaaatatttcacacagtactttttatcaagctgcagagatatcagatgacacaaaagtcgtatttagaattaagctacaacaagaaccagccaaagaaaaagaacttacaaaagatcagaaattgatggtaaatgccgtaaatgaggttgttttatctagagtaagatttaaagcgttagaagaagtactagaagagaaaggagtattcaaaggcaatgaattatttgataagattgaaaaagtaactaaaagagactttgaaacgttaaagaaagaaatactggatgataaagaagaaataaacatgtaaaagcacctctattttatcaaggtgcttacgtgtttttctataaagagccttttcgtatagtatttctgagaatacctattatgtaaactttgaaatgaattattactcagtgacttctttttccacagtacttattattctatacaaagctaaagatgtagtctccacatccggaaaatattcaatatggcctgtttcaatattcttcacttgaaaattctttagttctttagaataactgagagaaaaggtatgatttccactacaaaaggtatgagtgatttcactatcttcatatcgtaataacgtttctaacatttctttgatttttattattgtcatgtatcaccaaacccctttctcactatttaaagaaattttacaaattaaagtttaattcattttaacatagggtatatattcaggttattaccttcaataattgaaataaagattttaaaaatgaaataaatttgtaaaaaaaacaaaaaatgtaatgttgtattgagattaggtgatatatgacaaatgcaacatagtttgaaactacagatagatatggtataaaagatgcaaataaaatatatgttttaggggtaaagatacaaagaatcttatttaaaaatgacatttttggggaggtaggtggtatctgaaattgagtagtgcacctagattcaaaatgcaaatatacagtcctctgtcgggatataaggacctttatcattttaaaaaaacaaaagagggttggacgtttgaaaactatagatataagggtgaagtagataaaggtggtaatcctttattttatagatcccttattactgaatccatttcctgtcctgatcatctagaggtttatatttctagtgcatgggagaatgttgacacgttaaataaagaacaaatgcagaacatttttgatgaactatctgaatggatatcagacagtggaaaaaattctattgaccctttatcatagtgaaagaagtggcactactatgggtatatccaggtttgaagattcattataagagttttgttattttcacctaaaaacatatctagtgtcgttagcaaaaagaagaaggcctttcctttatataaaaagactaaaaataacaatagataataattcatttagagatatggattaattaaggataatgataatcagcaaacaaataaggggtgtattcaaaatggaagctatttataatcagagagagaaaatgactgattttattagagataataaacaaaatttccaggataaactcttatcggaggcggttaatgtagcctctaaaattaacgacattttagaaactggaaatattgatcttttaaaaaatgctcaaaagttatctctatatgtagtggagcaaaaagaagaacaactcattgcttttgctgagcaagaaggtgtagcttgggcggagcacgctttaactcttgccttcaaactagaatgggtacaggccattaggcgaacattgtggcattttctctatcaatatgatcgaataaataaccattttaagagccgtgaagaattttatgccttagagaagcgtattaatgataagattgatcaatttcttaacacttttctcattagttattccaaatataaagatgaattaattgcctcccagagggacttagttgaacatctatcggtacccattataccacttagccaatctgtagctgtattaccattgatcggaagggttgacacatatcgtatccaaacgattgaggagaaagtactgacaagcatctcagatttaaggattgaaacattaattatagatctttctggaattgctaatatggagatgcatgtcattgaccattttcaaaaaatattaactggaatttcaatgatgggatgtaaggcaattcttacaggtttacgtgctgacctggtgcgaacaatgattcactcaggaatctcctttgaagacaaggcagaaacaaaagggacgttacagcaaacattaaaagaatatctagaactccatcaaatgtaggaggaataggtaagtgtactctacacaaagaaatggaaatgaatttatgaaattagaatcgtttttgaaaaaataaatcagtattcagaaaagcattataggaaggggtcagtcccaagatataatgctttttgcgcctagaaaagcattaaggtagctaaaaatgtagggagtatacagcttgaaaacagaaaaactactgctcccacacatacagtagtttttctgttacacatatcttaagtttaagtactgatgcctcacggcgtcttaattagttttacgtatagttaaaactttattcgttttatcctcacgtactaagatctttttctagataaagtgttatcttttacatacatttcatagtgtccatttatgtaactagacacctttagattaagtagaagagcttttaggttaactattttttcagtatctaatccgcactcttttgctatatcttcaattccttttttactgatttgtatattatcttctaaatcggttactgtttctttactgtactggaaaggaacttcatctataacttctgtaattaattgatcctgcccttcacactctagtctccctttgactgcagcgtgttttccaattaatacagcctgctcttttatatccgataaaagaatcattaatctaattcgttgattcattagaatatggtgattatcaaaaatagagacaatttcggtttgataatcatccatggttgtgtgaagttgatgttttgcttctcttattacttcttcgctatttttaataagtatcatacttaaattctctgccctctccttatcatatatacttttattataacaaatcataaaaaggggacgtcatttttcactagctatcacgataaataatgtatataaacaaatattatcctggattcattaatcactaacattaattgcggggaaatataccggctcatatttttaaaagatttaccccaataataagcgacctcattaatttcaattagaattataaggtcgcttataagatatgctgattcaatttttatgttttttccgttcttttattgcaaagcaattgttttatcattaaactctcgtctcattttcaacatctttatccattgtactaagcacataaataaggtgagaatttagtttgaattgcttctcttcaataaagtcagataacattagaatggtattattagtcattacaatttacattttatctctttctcatgcatgatgaccatgattattcttctgtcccattttgcgcataataaagcttacaattaatactaaaataatcgatccaataatagctgggataattgcaaatccacctacgactggtccccaattacctaagataagtccacctaaccaggcaccaataaaaccagcaataatattaccgataattccaccagggacatctcggcctgtaattaaactagcaatccaaccaataatccctccaacaattagcatccataggatttccattaagaatcgtctccttattaaaagatttatttgactttacccctaaatgagacgaattaatcgtgggatttttttcttgtttagaggctcttctctcaattacttagaaaattccacacagatttctttaaatagttactaagcgctattcctattcaccatgtgagtttcctaaacaaaaatatgccatatatcataaatttatttgcttctatgggtcgtgtaattcgttttatgatatcttagtgatctcctttttatttcattcaagtgataagaacctattcttttatataaaaaagagaaaaacaatccgatttagagatcaattgtttttctcgacaaatatatagcttctactatctagatattctttttttacatccatatttaagtgttttttttagaaatactatctgattgtataactcgttcttagtaggtagatgtctacacttctcataatccgcaattaaacatttaatctccctatggaataggaaacgttcatagttatcgagtatgtcctcccctcctgatgttatttcttttacattaccccttcgacacataatgacacttgatttctgataatacctgttatgtcaactaattttgcatatggtatgcattaaattataacgattcacccctttattatagtaatatttaaagtgatattttatatattctggaaggagttatatttaaatgaaaaaggatttagaacgtgaggaactagttgatataggtagttttcaagtatatacaaaaatatttggaagagatgaaggatctccaacagttataatggatgcaggttatggtgattattctaaagcatggacagaaatagcgccatcaattgctaaatgtacaagggttcttatttacgatcgagctggcttaggaaagagcactataagctctaataaaagagttagttctgaaatggttaaagaattaagaatgctactaggaaaattgcatttaactcctccctatatattagttggtcattcttttggtggggtaaatgttcgattgtatacttctttgtatcccaatgaggtggcaggtttaatccttgtagattcaactccagaggattataggcagcgtttccttccaatcatgcctttagaatttcaggaagcttataataaacagtttatccatgagggtacctatgaccaatttatggagagtttagaacaagtaaaaatacatagaaaaaaacttatagatacacccgttattattcttgcagcaggaaaaaaagctttttattcgcctgaggcacaagctttatggctgcgtatgcaggaagaattattggacttatcaacctgcagttcgttagttatagcacctaatagtggacactatattcaaagagatgagccggattatgtaataaatgcaattgagaggattcttcaaaattcataatcagctacctataaggggagcataccagtacattatggtaactaatataatgctcgggataggggaaattactagagaaaaataatcaacaaaaacaccgtttcaaataaacggtgtaataaaaattcgtcctaaaataatctagcttggatcattttcatctaaagagagagtagttacgttagtatattctcctttagaaatttcctctggggttgcatctttttgcaattcatcttcagtattcattccttctgcaattgttggtttatcagttgaatttttttgttttttcatccagtacactcctttcaggtttatttttcccaacaataaacctttcatcctctggttataaatgaaaagattttaaacacgctacttagcatataatttccgataagcgccactatgttaactaaaaatatatagcgtatacaacttaaaaacaaaaaaactactgctcctgaacagtagttttttctgtttacacataattttatacggaatgatgatttacatcatctttagtagtttgctcgaactattaaacattattcattaagaacgtttgtctaatgacctaatcttttacggtcatctgcttgaggtggttgctctaaccattgattatcaatcatttctttcccaatacgattaaacatccataaactagttaacgcagccttttcattaattattgcaatgtcggctctcatacttgagatgagagctgcgttataataggttactgctacaccataaaaaaatcctgtttggagaagcataagcctatctgaaaatggagaaacagtagaatttgtaacttctgtctcaactgatttaggtagatgaatgttctctttggttaataaagatgataaagaagttatgtgattggtcgtagtttgtacacttttctctagtaatgctcgcacgtttggattttttgaaacttgtgtaaaaccaaagatcatcgctttcgcaatcattgctttgtttaaattaaaataagtatgtccactttctattgcattcatgggtctctgcttaccgaaaacatcggttacatagctgtattttttaatcattcctaccttattaggtgttatatatatgggtggcttcagataaagttgttttgaaataagaaggtccttagctttcttatatatttccatcgcatcaagattacattggtaataaaactcgacaatatctttacgtatggaagtcgtaaaagctaagctcatttcattatgtccgtgtgtgctcatcatataaagggatttgagacacaaaacatccgtaaatagagaaggggcttctaagttaagatcctcttttgtaaaaccattaggaataggaaacttctctttcttaaataacgcttttaaggtatctatatggttaagtgagtactgaagagctgtttgaaaaaggctatgtatttcagaatcttggatcgtgtgaagcatatatttatttacacagacagataatgtttcacgtatatagtgtgtccataagtttgcaatttcaggagatgttaatcgattcttttcttgcaattttcttttcctccgtataaaaaactaattttttttagttttccctttttttaggctttcatacaaattaggttttcctcataatagtgccgataattaacattatggtacctaaaacgaaatagataaacatatgttctaacattgttatgtataggggtgttagatatgggagtctcttttaataatggtgaaatatgtgttgaagagataatctgcggatcatttatagaaataggaattaccttcatagctctattcgttatatatgtcggttacgaagtgatctacaagaaataaataatctattcaaaaatagtgcattacttatttttgtgccgaaaacaagtactatgttaattagaaacgtatgaaaaaagcactggatttttatcagtgtacaaccttttgtcctcattggttatacttattctcaatgtttagagcaattaagattccttcttttaaggaaaaaggaatataacgatgtcgttatattccttttcacacatggcaaacataaattttgaatcaacaaagagatgaaagcactgaatttcgttatttcttgatgaaaattttttctttcaacaggtttattatcactgaattctatcttattatccatccaatatttaccttgtattctttttttgaacaaaaggaatcttaaaagcatacaaggaggtgaatcaacatgtcaaacaacaacagtggtagtcgtaatcaattattagtacgtggtgctgagcaaaaatttttataggaaaaaaaggcagaaacacaaaaaaagaagaagcctgctatcagagcaattttttgtttttgaaaaaaataacccccttcaacaccgtaacgactaaccgccgttaccatactagcactgtaaaccatgactaagccgatgagacttagaacaattagggctacaataaatttgtaatcataacattttactattctcttaaacataaaaactcctcgttccttgcaagtataacattcttattttcatcataaaaaaaagattcttagtaaattatatagagtaaaaagaacactcaatagtataataacagttcctcgcgctttgttctttccgacgatataatcatttacaccatgtaagataaaagatactgcaaccataagaacagctatattgtaccagtaatcgctatcaaatagccaagctatactcatacaaataagcaatacaatcaacgttgcatttcgaattcgactatcaataaaaatttgtgcgtatttcatgaaaatctcctattactttgtcttttattatatatnnnnnnnnnnnnnnnnnnnnnnnnnnnnnnnnnnnnnnnnnnnnnnnnnnnnnnnnnnnnnnnnnnnnnnnnnnnnnnnnnnnnnnnnnnnnnnnnnnnnggattaaaatgtgaagagagccttatttagtattctctcacttaaacgtgagaaataaggagaattactatgtcattgactattacagataatttctttcacttcttaatactggatatcatcctcagtttcctcctcctttgttttattatttttatagataaatattttaggaaaagtaaagatacaagtgaagaaaagagaagaaaatatcagaaagattttattgccttgttagcagtgggattaatcgtttattttatgtaacatactatacaatagagaaatattaatcacatgaaggagcaggatcatgattcgaacaatcgctattacacaagacttacacgtcaaagaagatgtcccccttgatcacttatctgatccttcaattaagtggttctgggtagatcttgcctctccatctgaagaggaagcaaaagtgttagagacgtttttccactttcaccctttagctatcgaagattgtcttcatttattacaacgtcctaaacttgattattatgagggttacagctttttagttcttcattatttaaatagcaacacgttagatgttgaagaagtagacttatttattggggaaaattatctagtgacctttcactttaaaccggtactcagtattgaaacagtccgacaacgccttttacagcatcctagtggatttaataaaggagtgtcctatattgcttatgcggttctagaccaattagtggatgattacttcccaatcgtatatgaaattgaggataaattaaatgaaattgaaagcagagatgccaaaaaatcaattgctttactaatgaatgatgtttttgatatccgaagtgatttattaaagctcagaaaaaccattcttcctatgcgtgatctgctatatcgaattattaattctgaacgtttatatatacctgcggagcagaaagcctatttcaatgacatctatgaccacttgataaaattaacaagcatggtggaagccaatcgagatatgacatctgatatgagagataattacctttcacttaacgccaatcggatgaactccattatgatgacattaacgattatttcctctattttcatcccccttacatttgtcgtagggttatatgggatgaactttgatcatatgccagaacttcactggcactacgggtattatattgttttaggaattatggctttaatgacaattggcatgattctctggtttaaacaaaaaggctggtttaatgtaaataaataacctcaacaatatgctgacgtatcttccaaaaatgcttagttaaaagcagccctaaagaatggggctgctttttaagatttccaataattacgaatatattgaccaaagcatatatttaaaatagatttttaaccaataagaatcttttcttctgcataccgaattttagcttgcttatttgagcgaattgcaagtacgaacccaatagtaagaggacctactctaccaataaacatcataaccgtaatgagaattcggccgataggacttaagtcgcctgtaaagttagcacttaatccaactgttccagaagcagaaaacgtttcaaacaaaagagtagccatatctacacctttttctgtaattgtaagtagaaagaaaataatagaaacaaaaataattccagaagtagtaatagaaaaagctctataaacaagtgatttaggaattcggcgtcgaaaaacattaatctcttctttatttgtcaatactgaccataaagcaaacaatattaagacaaacgtcgttattttgattccaccacctgtcgaacctggcgctgctccaataaacatgagccccatcatatacacttttgaaggtaatgtgagcgccccaatatccacggtattaaaaccagcagtacgaggaactactccctgaaagtatgctgcccaccatttatcgcccatgctcaattcacctaaagtatgaggattatgatattctaaagcaaaaataatcagtgtgcttacgacatttaagaggatagttgaaactaatacaattttagtgtgaagagaaaacttccttatgtttcgttttcgaaaaatatctgcaatgacaaaaaatccagtccctcctattatgaaaagtgacgtaatcataatatttacggttggatctcctacccatttacttaaattatctggttccaaaccaaatcctgcattgttaaaagcagagacagaatggaatatgccataatagattgctcttccccagctcatttcttgcgaccaacgaatagctaggataagggctccaatcccttccacagccaatgtaattagcacaacacgttggactaatgcaataacgccttgtagcgaaaaagcatttagagattccttaagtattagcctttgttgtaatccgatttttttacctagcacaataaacatgagtataccaatagtcatgaatccccagccaccaacttggatgagcacaagcaaaatgagctgtccaaataaagtaaatgtagtccccgtatctacaacagctagtccggttacacatacagcagaagtggcttcaaagagagcatcaataaagcttaaatgatgtctatcactcgtggcagcaggaatcattaataagcaggtgccgagtaatattaatcctaaaaacccaacgaacaaaatacttgcaggttccagatgcttcactttatgttttttacgtggcttagaaattatcatattacatttcccttcaaaatgttttgagtaaagatttattatatatcatacccatttatttcaaaagatggtcattgtttttattgccttcagtgtttacggtaaaatccattgtgtaaactaatttttgtatatgatatatgtttgattacactcaatatttaattaagagaacataaaaaaaagagcacatccaaaaggtttgctcttttttattgtttaaatcttacgctgtttgtactcatttcttttctactgttttttgtttcgttatataagcagcagctaaaaaaagaaagaaccactcgttctttgccaaaggcaaacagaacgttccttttttaaccttgcattttatctgtttatgtactatttcatttagtatctatattgctgttagttttcaaggatttgcaccttaagaaatatttatatataaaaaaagaaacccttgtctatatagacaagggttttcaaagtttattggaattggggaatacgttattagtctggccagatttgtagattcatatacatatatcttcaaaaataaatcttgtatccgactataatttcataaaataactttaatatttatcataatctgttatgtaaatattaaagtattttatatattattaatgttttatcatttacttgtaatagatgatatagcagcatggatttggaaagcataaaagtaaatatggctctggtgtgaaaaattcaaagtgcttgaaagtaaattgaattttttacaccagaaccagatagatgattaacttcttcatactatttgaaattagacttgcccatttcttgtttgcttctaaatagaagtattaagttctccttttctatttttttcattcattaaggtttttgcagctcttaacgctaaaagatagctgtcaaagccaaaaccgcaaatttgtccctgcgcaatttccgcaaatacagaatgatgtctaaattcatctcgggcatgaatattagacatatgaatctcaataaacgggacttcaagaatgtccaaagcgtctcttaatccataactatagtgggtccatgcaccagcattaatgatcactgcattcactttatcaaaatacccttgatgaattcgatcaatcatttcaccttctgaatttgtttgaaaaacctctaattcaagtctcagctctttagctagttgaaacatactctcattaatttcatcaagagtaatagatccatagattttaggatttctttttccaaacatattatggtttatcccatgcaacatcagtactttccccatcataatcactccaatgctatttaaaatagttagtcttccatccatggatatacagttaatgcttcttcaacggaaccttcttttgcctggatcagttccagatttaaaccatccggaaggaccacccaattatgtcctttaggtaattcggtaacattccatttataaacttcttccatagcagcctctaaatcttccaccatgattcctaaatgcgccagtcttccttcgacacctgagaagttaggatctgcgatcagttgaactccaccaatagtccatatttgtctagggttatcttttcccccatccattttacgaatcgacatatttaatgcctctttaaaaaaacgaatgtgccaatcaatatcctttacacgaatagctgaatgttcaagatatgcttttttctgatagggcaaatttcagtcatccttccttatcaagaatttatgtatttttccacccaagtttcaatcccttttacgttcgcaaccaacgctttattaactggtgttgcgacattacttttctctccccatcggacaattgctccattgatataatcgatttctgttttttggcctttttcaagactttgcagcatggatgttttaaattcatatggtaatcctgctgctgctttcaaccaaatatcttcggggtcctccgttgataaaataatgccgtttgctttagcaacatttataccctctaaaatagcttcaaaagcacaatctctaatttcaggaatttggtataaatctccatatggtaatttcgtaataccacataaagcccccgttgccacattaattaaaagtttgtcccaaatcattcctgtggtattactactaacctctgttaataacccacattttgtcaatatatctgcgactctctgaatcctttttgttttttcgccattcatctcaccaataaaagtaatctttccctttgttccggcaatcacatgtcctggtccaagtaatacgccgccaacataagtttttccaccgataacacgatcgttgccgataacctcggcaatagtttcctcatttccaagaccattttgcaatgacatgaccaatgtatcttccccaataatggatgaagcattttcaatcgcatttcttgtatgaaaagacttcaccaatactattacaagatccactgctccaattccctcacagtttgtttgggcatttaccctaacagccctatcattcgttccatccctaagaatcaacccctttgtattgattgcattcacatgatcagcccgttgatttattaaataaacatcttgccctccctccgccagagtgccaccaatggaacttcctagagcacctgcgccaagtacacagattttcatttatctcactcctttgcattgtttaattttcaaaaaactttaatgtatgctgtgccaccacgcacaattctttattttgattgtaaatttcaaccttggcatatgacttcaatgattcttgatcaacttcagtaatcgtataaacagctgtaactgtatcgccaaaatatactggtcttgtaaaacgtaaacgatcgtagccataggacacacttggcatttctgatctcgcttgggtttgaattaatgttgatgccgtacttccaagtgcaaaagttaataccccatgtacaatccgtgttttatatggcgttgttttcataaattcttcattcatatgcatttgactaaaatccccggtaatcccagcaaacaaataaacatctgattcactaattgtcttggtataagaaaccgtatctcctacttcaaaaggaactttcttactcataatcttcctcctagcaatcatttaatatagtatgaacaaatctcttatacttccatttgctcccaatcctttttaattcccatatcctctgcaaaaaataatctgctatgcatttcttttaaatcagcagaaatttgaggtctaaatgacattttctcaatgatttgagtttctatatcaattccaggtgcgacttcacataattccagtccgtctgttgttaagcggaaaacggctctttccgtgatatagagaacttcttgccctctttttaatgcatcccttccattaaaagtaagctcttcaagttgaggaagaagtttcttaaatcggccttcttgttcaatttgcagcttacctttttcaatcttcgttttaaggccgccggctgtcagtgttccacaaaaaacaatcttttttgtattttgacaaatatctataaacccgcctgttcccatgattttcccattaaatttatgcacattgacatttcctgcttggtccagttctgcaaagcttaagaagcagacgtcaagaccaccgccatcataaaagtcaaactgtgaaggcatatctaacaatgcatgggtattgatgcttgctccaaagaaaatgccttgtgctgtgacaccgccgattggtccagtttccaccgttaaggtaaattgttcatcaacaccttcttcacgagctacacttccaattccatcggcaattccaacaccaacgtttcccacatttcctggtttaacttcaaacaatgcacgccgagcgatcatttttcgatgattaagcggaagccgggtaacttcacttgtttccgcgatataatctcctgacataaaacgattaactccacccgtgtacagctgtgattgttcttcatcaacaacgacaatatcgatgttgtagcctggaatttttatcgattttggatgaagagtatttgactttactaccctttttacttgtgcaataacaagccctccattgttatggacagcctgggccatcgctaaagtatccagatacgcaatttcatcttccatactgatatatccttcacgatctgcagttgttccgcggataatggcaacatcaggtcgaatcgctggatagaacagccactcttcaccattaatttccattaatttaataagatcttctttggtacaatcatttagttttccacccttttgccgtgggtcaataaatgaacctaagccaacatgggttaatattccaggatgtccagctgcagcggctctaaataattgacaaagtacgccttgcgggaaattatatgcttcgatttcattattttcagccatttcacagagtctaggggattgtccccaatgtcctccaactatttttcgtactagtccctttttagcaagtggtgacattcctctgtccgcccggtcgcctaatcctgttgtatggataaacgttaaatcttttggcaagtgtgtttcttcatatctttttgacaatgcttctataagcttagtaggctctaatagacccccaccagctccacagatagcaactattgcttcatttgggatatactttacagcctcttcagcactaagtactgacactaaattcccctttttctttggcttttccaagatagtcacttcctttctgttttttgagacatttgttcctttacataataaacgggcatttcttcacatgtccaaagttcgaatgctttagctccctgccatagcatcatgcccaatccattgattgctttacagccaacagattcagccatttcaaacaatttcgtttttcggggattatatataacgtctgaaacgattaactctggacgaagccatgatgagtctgggattatactctgtccttcaagaggattcatcccacccctggttgcatttgttaaaatatcactgcttccaatagacgatctaagaagttctgtatcttcgatatgatgaaccgttgccttacaattaccatcgatttcattgttaataatgtccgcattttttaaagcccgtagatatgattcatcctcccggttgaaaatgtaaatttcagatgcaccgtcaatagcacattgaatcgctacagcggagccagcacctcccgcgcccataagtggcattttctttccttgaatgtctacaccactttcctttaatccacgtacgtaccctataccatctgtgttatagccaattaattttccattttcattcacgacggtgtttaccgcaccaacaaatcttgcagctggtgttacctcatctaagtaaggtaaaattttcattttgttaggcatagacacattaaaactacgcatgtttagtgcacggaatcctgccaatacatcttctatttgttgattcgccacttcaaaagccatataaagatagttaagacctagtttacaaaatgacgtattatggcatcaccggtgataaagagtgtccaatcggggttgcaattaatcctattaattgagttcttccatcaattcgtccttgatctgccataaaaaaacttccttatattatccttatttttaatacctaatttagattaatctaacttcttcataaccaatacctatgaaaacgattacaaattgatcatttaaaaaacttaattaaatatgaacttactgccttttgaaatcattttattatacgttgcaatcaataatccaattggtaattattattcacttataggttttgtctataatttatcaaaacaaagtgtatttattactaatgaaacagagagagctaattataacagtttatctttgtcataattagctctcttttaattactatttcaatcaaatttgctgattattattttctatgataaagtctcgaaactgttgaacaattggaggcaaatatctgttttttctaactgccatgtaaatagactgctgataaataggctctttagtaggaaggatttttatatcaaaatagttcaatgtggaaacaagcggaagaatcccaataccttgatttgcttcgactaaacctatcaatgcattatcttctgctacctcacaagaaatttcagggacaatccctgctcctgcaaacaatttatctaaaatcggtcgcaggccactgtttttattaaagcagacaagcttgtaacctgcgatatcttttaattcaacaaattcgcgttctgtcagtggatgattcttattagtgattaacacgatctcttgtttggcaagcggtagcaattcaatatctggttcattttcaatgttagtgcaaaacgcaatatcataattttcttccttgagacctttaatgaccatttgtgttgtcccctgataacaggaaaaagcaatttccgcattagagttttcatttacaaactgttgaatcaatgacggtacaaaattggttcccaatgaataaataaaagcaaggtcgattacaccagaggttgtacttatcaatttttgaaggtttctctcccccttttcaatttcagttagtcctttctcaacatacggtaaaaacgattgtccaaatttgtttaactttacattacgcccttttctttcaaaaagcttaacacctaactctttttcaagttctgaaatagcttggctaagactgggctgtgtaataaatagctgcgaagctgtccttgtaaaatgttccgttttagctaataatcgaaaatattgtaattgtttaagattcaaacgtgccaatccctttcaaaaggattaatctcacaaaaatatgttattaatcactttttattttttttcttctctttttattattttactatgatgtttcaaatacaataaattttcactagattgatctaaagtggttctttattaacataaaaatcaaatctcaatatgtaattaagtagatttgatgctatctgtaagaacaaaaaaaacacaaaccactatatatggtttgtgtttttggagctaagaaatagcattaaaagaaagattgtctaataacatagtaacaatttaacgctttaaagaattattgtattcataaaaattgtacagaaaatatataagcatttaatgttaacacattttaaataatgtaatctttattaaagacacaagatgaaagttttttattttcaattttattnnnnnnnnnnnnnnnnnnnnnnnnnnnnnnnnnnnnnnnnnnnnnnnnnnnnnnnnnnnnnnnnnnnnnnnnnnnnnnnnnnnnnnnnnnnnnnnnnnnnattttccctttcgcccttcctgactccgcatttaattaagataaatgctagttaacatagtcaccatcttaggaactagacaaaaaataacccttgtgacaagggttattttttatctcaacaatttttgtttagtttaaatatttaattatcattacttaatctttaactaattttaaatcaggagcatgcttattagtttatctaccgtagtatgctagccatgacctgcttaagaagcagatgaggatttgatgccccctcttttgtacgccatgctacaaaaccgtctggtcttatcaatacagctccttgagaggtaacatcgtacaatgcttcccagctatcctcatactcaacacaatctccttgtgaaccgattccataaacgttaatagggacacctaagtgagaagatacatttcgggcagcagtgcgccacgggctattatcttttcccgtaaataagacgaaattttctcctattaaatccaaggtagatatacgcttaccttgatacctcaaccacatatgtggagcacgtgtacctggttttccgtttagctctaattggtccattctatgtgttgtatcggagttttcctcaataatggctgttgagttatatttataccctacagtaactgcaagatgatccatattattgagggtgcttacacctttcttaataacactgaataacaaattacttgcatattccgttgttacttctgcagcatagtgtctttcatcatgataagtttggagcaatcgtgaatgggcttgtttgtgtatcactgcagctaacttccaagctaaattatgagcatcttgaatacctgtattcgaaccaaatcctcccgcaggtggcataagatgcgctgcgtctccaattagaaagactcgattatcttgaaaacgagtagctgtctgttctgcagctgcccaaggtaaaatactgaagatgacaatatcaagatttgaaactcctatagctttttttaaaatctcacagcatcgctcttcagaaaaatcttctggactttcgccatttgtgggattataggccacgtggtaaatccattcatctcgattgttaacggtgatgagcgcaccaaatacctctggatttaggatttgaatccagccaaactggctaggctttagaaagcgacttagatcagcctgaaaatagatattaatataatgtcctccgatgactcctcttcctgtagttggaatttttgtatgttgacgaattgtgcttttagcgccgtctgccgcaactaaataatcacttcgaatcttttcttttgttcctgtctctcggtttattatagtggctgttactcctaaatcaccttgttgataatctataagttcagtattatagcgtatatgcccttttccctctttagcagcttgaagaaggataggctctagttcaatttgataacaagatgctggctttgaagggctcaccttttcaaaattttctattctctctttctcaagagccttttgggagttctccgcagtttctaatttctcaggatctatgcttttgattgtctctaccgcaatccttccgcgaatattatctaatggttcactagcagtccgaatagctgcctctaatccaagttgtcgaaatatttccatcgtacgaaatgtaatccctccggcttttggatggatagctgtaccagtgtgtttttcaatgagtaaataatcaacgttatgacgtgccaaaaagagagcagaggtgagtccactaagacctccccctactattaaaacaggaacatgtttgtgtatcatagaaattttcctttcaattttaaatgtacccatgggccttactgaattcagtaatcaaactataatataaaaataaatgaaattgtagactgtttttaggttatgttttataatgataatagagtacgcccccaaattaggggcgttttttctataacttttaaaagaatactcattaatgttaacggaaacaacagacacttcctgactttatacatattccattccatatgtctgtgtccttatattttatacatgttaagttctcataatggattttatcggtatgaaatagaaaagaaaccgtttaattttaataaaaagaaaccgttttctttttttgctttctcaaaatgatttaataggttataataaatacctacaaaaatattaaatgatatgtaagtaacaagcaattacacccttaatatttaaagaagaaaaacccaccattcaaattaggtgggtttttcttctttaaatatatgtgatgcacatccttagttaacataaaacacattccggaacccaaccaagaaaagctcgcaggagaagaactcttgaaataataagaataacggcttttcattaattactcattatcagccgattgtgtggaaatttgccaagtaacaccgaatttatctgttacttgtccatatgatgggctccaaaaagtttcttgaagtggcattcctacttgaccaccttctttcagcttttcgaacacttcttttgatttttctacactgtctatagtgatagctaccgttacttgtgatccaatttggtatggttgacccgggaatgtatcagaaagcatcaaatcattatcaccaacttttaagtgcgcattcattacacggtctattgcttctataggagtagggaattctggatttccgggcatttctccgaacgtttgaactccaataacttttgcatccaatgctttttcgtaaaatttaacagcttcttgtccattaccgttcataactaaataaggataaattcctaaaaccattaaaaacacctcttttaaaattttagttagactttactaaatcaaagttagatgaaaaaagaactcacgtttgatttagtcataactctcactacgtatctatacaacaaattcattgggttatcctgcagcgttagtttattaagaaaaaaagatacacgtacatctgcaaacgtagaattctatgtacaccatatacaaacctagttaccataaaaccatttctaggaatctaaaacctcttttagtacaactttaaattttggtctaaatactaaatccataatcgttataaaacggtcaattccttgatctataaataatcgaattgctttgctttctttattatcattcatgatctcaatctttgtaaccgattcgagactgtagtaaaagatctcatcaccttctaaatcctttactgaaagcgagaaagaattataaaatggtgagattttcacttcaaacctgttcatttcgctcgtaaagataaaagtggattcatcgtacaaaaagctctcattttggtcttttttaagtggaatacattcaaataatgaaataaagtctaattcttcgggacaatctcgcatttgtttcctccttggtcgtaactatctatttaaatagctccttttgcacagtattaaaaaacaaaaatccctcaattattttcccatatactttaatactcttcaattaccttatgtatattccatacaaagttatttaatataatcacagtgattggtagcatttctaaaattaatgtttaaaatggatggtttatgaaggaataaaacagcctacgtatagtaagctaatcatcattacatacttattttaccttacctattataagtaaggccaatgcataacaaagacaggatttattcagtttgttgattctctaggggaactatttgtcttcattgatgatgtatttgagttaaagaacaaaatgaggttaagcgatttaatcgatgttcgctttgtatagtgatccaaaacaaaaaatagccaacgtaaaaagccacttgtataaaacaagtggccttttgctacgttagatataagacttttatttttctatacaaagattgctctgagcttgtttagtctgttttcgtttagatagaacgttgtcggcaacaattactacgacagaaacggcaagagcaaaagccccaatccaaggaatataattcaacaagccatttttgacagcaataccgccgataccagctccagctgccattcccagttgtccagcagcactgtgtaaactaagcacaatacttgctgcagcaggagcaaggcttataagctgaaattgtattggcgcgccggaagaccaagctgaaagcgcccagaaaataagcaatacatagaaaagaaaagcaaattgaccgataaacgggaatagcaatagtgcaatagcatggagtaatattcctccagttaatgtacgaaatgatccccacttatctgtactaaaaccccctaatttggatccaatagcgctagcaataccaaatataaagagagctgtagttaccccttgattgctcattccaaatgtatttaagaaatacggtgaaatgtacgtaaatacaatggaatatgaacctaaccatagaaacgtgatgagcaagtatgctgagatacgtggtttcataagaaatttaaactgctcacgcaaaggtacaggttcttcagcaactgtttttggtatagtaaacgacgttaaggcggtgaaaagtaatcctactacaccaagtccaatgaatattacattccaatcataatgcgaagccacaactctccctataggtacacctacaaccaaagcagtactttgccccgtaacaactgtagcgatcgcacctccctgctttcctggagctgctaaaactgcagcaagggttagaagcgtaacttgaataacgccggcactaagggcagagatgattctagctgccattagcatttcataacctgttataatcgcaataagaatattgatgacagagaaaacggttaaagcatagacaagaagtttttttcgttccagtcgagcagtcatagcaattagaaaaggtgtccctgctccaaaagctattgaaaacacagtaattagctgtcctgcagatgaaactgaaatgttattggcctcagcaattctgtctaagattccggcaataacatattctgatgtaccattaagaaaactaatggcagctaacaaataaattttccacatatttgacaaaataaatcacaccttttgtttttgtatttcggtatttctggaaatgcagatttaagttcgtaaattaaccgaacgtttgaaaaattaactgtaaagagctgatttttacacatagacaaagtgacctttacagtttcttgaaaaatgttttataaaggtaacacaccatgaatttaatgcgcttatgataacgataggtgatttgctttagcctttttgtctaaattactagtaatggatatactcataatttagatgaggttacctatcaagcaatttagccataatccagacaagaaagatcatatctcttatttctatattttcataagtatagaaatatagaaataagagaaattacttcatcacatatggagcatactttccaatcaactcacggtctaggctgtagtatatatatgtgccttctttataagtactcagaagtctgcaatcagttaattgttttaagtgatgggataaagttgatccagcaattgattcaagctttattccaatatccgaacaacataaattcgcttcattagcaagcaaacgagcaatttttaatcgggtcggttcaccgagtgctttatatatttttatcgcctgctgtaacttcgaattatcctccattgttagcacccctttttctgaatgaattagatacatcacatgagtacaagctaacattatagtggcaagtatactattgaaatctcattttcctgatggatcattataaagtattgctaaagccaaatgcactttaaggataaaatcctcaaaacagtactataagcataaatcaaaataatttattgcaatcgctaatcctaattatcttcggttaatttcttgaagttcaattctctttcatgatacattggattctaatacaaatgaaatgcatattaattatataggagataacaaaattgatatgaacaaatcacaaattgaacttattgtccggatatcagaaacaggaagttttacaaaagccggtgaagaactacatatgacacaacctgcggtaagtcgtgctgtagcaacaattgaatcgcaactaggaacaaagttaatcaagagagataaaaagaacggattatcttttacagatgtaggagagcgaatattaattacttttagaacaatcctgagtgaattacaaaaagtagatgaattaattgtggctgaacaggggttagaaattgggaaggtacacattggcgcttatcgaactgcttgtactaggtttattcctaagatcatacgtacaatggaaagtcagtatcctggtatagaaatcaagctttcagaaggtagtgtagatcaagtaaaagagtggttacgttccaaatgcattgatgtaggaattattattcctcctgataaagattttgataccgtacctttaattaaagatcaactgattgtacttatgcactcaagccatcctttatctcagaaagaaacaataagtattcctgacctgcaaggtgaagatatactaattggaaaatgcggttatgaggtacagattcatgctttattcaacgagtataacttgactcctaaagtacggtttgaaatggattatatagagacaggattaagtatgatacaagaagggttaggaattaccattacaacgaaacaaaatatttggtggttgccagaccaagtcgttgttcgtgaattaaaaccagatacgtatagagatatcaatatagcagtgctagatatgaaagatacatccaaagcaacagatgcctttattcagacagctctcactctttttgctcaagaagatgcttaaatagcacttaaagaaacatgtattactatttagtgcatatatgaaagacagccgtttgattcaaaaagtggctgtcttttttatttctactatttttaatcgttgttaatcaaacaaaaggatgatggaagaatccgtataggacctagagaaaggaatattcagtaacaccgcttattgtatgccgttatatactttgtttaacaatgtctttagttgagtattttcttcatcacttaattgacgcgtgacgaagaggtgagcgtctttaactaaaggtgaaagagttttctttaactcttctcccctttctgtaagaaatagatagtgtaagcgacgatctcgttcactgtacattctttttatgagtcctttttcctccatcgcataaatcatttctacaatagttgtttgtttcttatcaattgcttctgctagttctgtttgggttatccctttgtgagagtctagaacactaatgatgctccatcgtactggagtcatgccataaggtttgagttttttcttgaaataattcattgctcttacatctgtacgatgaataagatggctagttaaatcatgtaaatccataacgtcacctcagaaagatagaaaaataggtattaagctaataatcgagtaatataaggctttattagtaggcgatacccacgcgtgattctatataatcgctactatttatctgaccaaatgtattcatgggaccaaacctcctcttgcacacagtaatatcactctacactttaaaagttgttatataggccttttcaaaagttaaaataaaaaccacgatttacttcgtggtttttatttcacagataggccctctgctttacccttagctgattttgtgattttccaccctaataagatggcaatgaatcctataattataagaagatataacgtcggaacgaaacttcctagataatcatgaagaaatccaattatgaatgggccgactgcaccgatcatatatccaattgcttgagtcattgctgaccaagtacttgcttccataggggaagatgccatatctaatggtagcaacaaacttagcgacacaaggccaccggcaccaacccctaaacatatacttgaaacaataggtgttacgtttgtaaaacataaaagggataaactaattattatacttaaggtaaaggttgtaatccaaaaccttctgctcggtagcacttttaaaagactaggtaataaaagagtagctggtagctgtgcaatcatagcgattgtacctgcaagaccaccaaaagctggcgtccaccctttttcctctacaatggctggtagccatgctgcaaaacaataaaatagaagagttacaatccctacaaaagaagttaatagccaggcttttttattttttaatggtaaagaacccttcgtcttttgtgaaaaattactcgcaggaatacgagattgttttattaccacaagccaaagtggaatagcgagtagagcaagaatactccaaaatgctaatccatttttccatgaatgattgaaccagtgttgaagtggtgtcgttagcccaatagaaatagatgcacccactaccattgaagtagagtatatgcttatcatcgatgctgccttgtctggaaaatgacttttaatgaaaccagaaagcaaagggcttacaacgccaattcctgcaccaattaataaagctgttattaacaggtaaattgaggaatttgtaaaggcccttagaaacgttgcaatacctatgcaagttatagccaaagtaatcatcttctctgattgatagcgatttgctaaacggccagcaaataacgaacaaaaaccaaaacataccaaaggaatggaagtgagcaaactagctaaagtagaactcatacctagatccttcgttattccatgcaagactgggctaactgaagttagacccggcctaaggttaaatgcagctagtataagtgcaagtagaaacaatttattgcgattgaccatactaattacctccggttaatttcttgaagcttaatcctcttctatggtacattaggtttcgttataaataaaatgcatattaattatatggtatataacaaaatcgttatgaacaaatcaaaaattcaacttattgtttagatatcggaaacagaaattttacaaaagccggtgaagaactacatatgacacagcattaagtatggtacaagaaggattaggaattacgattgcaacgaaaagagacatcttgtcactgccagaacaagtagtttctcgagagttacagcccaacacattcagagaaattaatatagcagtgctagatacgaaagctacatcaaaagcaacggatgcctttatccaaacggctcgtgccctttttactgatgaagatgcttaggtatcaaaaagagaggaatggtagaatgccatttgtagtaggttatggaattgcaattataggagcgctgatcgcttatcaactaagtaagggaaaaacgaaaaaaagacaatatattgtttggggaataacgctaatgttagctatttcaccctttttgtctttcgcacttggcttaacatacgcagctattacagaaaacggatgggcagccttaataatgtggtatatctttcccgtaattttcgtaataggacttatagtgttagtgattggtattttcaagaagaaagaacaaagaaaagaagcagacctttaattaaaggtctgccttttatttccactgacaattcacattatgtgaactagagttttatattatcgatataacaaaaatacacattaacctttttatggtaaaatattcaatgtttttatttttacatataattacacgatttaaagttagttatggaggacattttatgttgagaaatactttaaaaatactatcgatcccattaattttagttcagttattaattttatacttctggatttttgattgggaaaagttagttactcagattggtttaattacttggatcgtttcaattgttttaggaatcgtcatatatctcctctatttaaagttatctttaaaggataagagcaatatagctagtaagagagttgtattatgctctaccctactaacgattgcattggctatgggtgccttgctaattgaatttgttacaagttcaatgccttaaatatcttttgactacctataagctgttttatgttaattaaaaagtaaaagctactgaacaggggtcagtagctttttaacgaagcatgttgttaactcaacaagtaatgaggatttccaaacagaagcttcacagcgtcataaatagtctcccctaaaaactatttgttattactcattaaaaaaatgcttatataaggttagtacaagcaggaaatattattttgcattcaaatactagtactataatttcaaaacgaaaatgggggctagtaggatgctggtaaaaaagatgttaaatggaattatgatgaaagaaatcaccattaaagaattagctgatcagtatgatgtaagtactcgtaccattcaatcaaagattaagaaactaggctatgaatgggacagtaaggaaagtatttatcgctacgttggagaagaatcagaacctttggatgttgattttagtactcttatttctaaaaatagtaaaatgccagcataacaaaagctagccaataatgaaatagcagctagtgttagctatttaaatgaaagtgaaagtagtaatggcagctttgaaaaagctagtacagtagatgcaattgatttgttattgcaaaatccaaaagaccgttcaaaacgagtgtatcgaggtttttattttgatgatgatgtgttacgtattattgatcgagtcccaaaaagttataaatcagaattagtgaatgaagctctgagaaaagtgtttaaggaaaagggattagtagactaaaaaaaagcagcattaagcctgctttttctagccttaaaggcatttatatgattatgaaatgcgtattatcttctgtgaaggttcttgatgtagattttgaaattgctaaacagcgtctgtcatcgattcagtattcaatttctttaagatactttttctttgatttttaatggtgctttcttctgtatgaaaaaggctttgtatttttgaaatagaataaccatcaatagcacgagcaaagacttcttgttctactttagtaaattggttcataaagaatttctctttaaggattttgcattcttcttctacattcttcagtcgaacaacttcattaactaaagaggtgttatgttaactagatatgtatgcaatattcatgttattaaataagcttataaggattaccatgcttgagatccaaacgaacagacccgtttggatttaaataatattaatactgcattgaatttaccgatattgtaaaaaatttcccgaaacagtttaacactaaccaaataaactgtttctattaaaccatttggatgttatttggcagaagtaaataaagctaatacttcttgcttactcgtgtttgttttacactatataatgaaaacaattaattgactatttttatgatgaaaaggttggagcaggaaattcatcaattttgatacgaagtaaactataaggtttctctcgtaagtcttttccataatgaaatctaggctgtcgatgtaattggttcacaatgacatacaaatattgatccggaccgattgaaaaagtatccggccacaaaattctcggatcatgtgcgatagtttccattatgccatttggaaatatcttacgaatactgttgttttcgtaatctccagcataaacagttccctttgcatcggtgatcattccatcagaagcacctttttctccccaatactccacatgataaattaaatctttatctggtatagttcggttccttagaacttctgttggaatcgagaaaagatgacgactggttagtggacaaaaaaataaaactttgccatcgggagaaatcgctattccatcagaagccaatctaaatggggaagttgagccatctatgtttctattcatcaaaatttcaccttctaccttcggtaaaaaatagggatcgggtgaagttgattttgctccatttaaccgtctaaacgcgtttccatttgataaatctacgacaataatagctcctggtccttttgaagaagaatctgttatataggcataacctgcttttccaacacgaaaatcaaaacggacatcattcagataagttgtaggtagaacaacatcttctgtaaaggtatatacttttcttattgtattggtttctaaatcaacagcgactaatttcgctccccccttaataggttcagaaaaattgggtgctgctgtatctaatatccaaagcgttccccttccatcagcgactacactttggacactgatgaaagtcattgtgatattttcggagttaaccaaattggtttgtaaattgggataagactgcaatttatcttgaacaatttccgccactgtaaatttaacatcgtctccccatttcggaaagcaaatgaaaatacgaccggtttctgaaacagtaacacctgtaggcatagccccataaaatgcataaactagttctaaattaccgaaatatttttcactaggtaacataggtttcataatatcctcctcaaacattcaaacgggatatctcatatatatgatttatattttttctaatgcatgtttcttaataaggttttctatacgaaaagatgattgaattgattgttttcgaaatttaataagtctctcagaaggaaggaaacattttaatttaaaggtctccagatgaagtagaattcaattagcaggtagcgaagttcaatattcccagatcaacggtaagctgttataaataagaaattaggaaaattttcttttttaactttatgaagaaatgtatttaagctaaaccgcctctttagcaatttaagtcccctactcttttatcatagctttgctttttaaaaaaatttcgtataaagtgatgattacatagaatactgtatcagtcagtggtttaataacatttcggagggaaaatgccaatgaatacaaaagagttaagaaatatccatgcactcgtaacaggtgcttcaagcggcctaggattttccatggcggaggctttgcttcaaggtggcgccacggtggcgttagcttctagaggtggaactaaattggatcaagcagtagagaaattaaagcgcgagggttatcctgctgttggaattcctttagatgttcgatcagaacaatccgtcaataacgcggtcgaatgggtgaaaagagaatgggggaaactcgatgttctcgtcaataatgcgggaattgggatgaggacagtaaacccgcgttttttagtcgagcctcagccatttttcaaagtaacaccagaggggtttcgagatttaattgacatcaatctcacaggctattttttagtagctcgagggtttgctcctttaatgatggaacaaggtcatgggcgaatgattaatatttctatgaaccatgagactatgaaaagaaagggttttgtaccctatggaccatcgagggcagctactgaatcactctcatatataatggccgaagatttaaaggaatatggaattatggtgaatatgcttttaccgggtggtgccactactaccgggatgattccggacgaagttcgaaaagagattgaatcaaaattccagctattagatccaaaggttatggccgagccgattgtttttttagcctcagctgctgcagagggaatcacaggtgaaagaataattgccaccgattttcaagactggcttcttaaaagaaaataagtttttaatcacaggggcggatcctttcctctttgaaaaagtagagctgtccctatgattattcttttatattttatagaatgtccagctccagcacgggtatcagccaatccgtcaacaagactaaagagcaaaccttctcgccagcttgtctagagtcacggtgaccgtttctatttcaaataagtgagaaagcggttgtacatattaagcatttgctacccgttagtttaagtgaaaatgttcataacctggaaacaattttatatcaaaatagaaccttgcttattcactgtttactaatctaattatggaatttccttagtataaccttctgcattaaagataaactatctttgtggaggtgctaaacatnnnnnnnnnnnnnnnnnnnnnnnnnnnnnnnnnnnnnnnnnnnnnnnnnnnnnnnnnnnnnnnnnnnnnnnnnnnnnnnnnnnnnnnnnnnnnnnnnnnncctttatctctttggtattagttcttttatatatttaataaaaaaaccacttgcaaaggaatggctccttgttttctttataaaaagttactatgcatcattggtcgataatctgattgtaaaaagaggctatgttcaatatcccacccgatttccaagacaagttaaaacaagcgtgttgtttgattacatacttttcccaattacttgtgtcttttataatcaactaactaaggattcccgcatcattcagtgccttttaaaagttctgtatttcagtatacctatgactattgctgagctgtggctagaaaaaaatacacgccttattaaatataaaaatggatggaattggacaactactttttattctctctctttttccttattattggttagatttacaatgtctgttataagacatatttttaataatgagtacgatttatcttagatagtgcttgttaatcaacaacaagaggcaaaaaaatataggaacatttgaagaaattttgtatgtagttacaattcgattgtttcttttatcagttgatacagcaagtacttttggtattataattaaggttactgtgcctattctagctttagctacaatcttagagtttatttattctttctttatcatcaatagaagaaacacatcaaaaaagagagctttactctacaagagcaaataggtaattgctttattaaatgtggaggagatcgctgactaagaattagagcagcagggctaagaaagaagagttatttattaattttgcatatgaacaaccttaatacaagggatactttatttctgcaattatctcatttgattcacacactttaggcagagattctttaaatgggagtataaaataactcatgcattgctaacatctctaaagaattcacctgttaacttgtccattaggaaaataaaaaaatccatgaaatcatttgaatttcaaggacttttttattatgtttgttatatgatatccactcactttagtaattcgttaaaacagtataaaatcctgtctgccatattgattgtccttactttcaaccgacttgtttctcaggtgaataactgctcttgttttgttttttttcacctggtaatttcataaatatcatcaaaatagcactaacaaaatacaaaccagcaaatatccacatgactccgtgtacacccatgctaccaatgaatgttcctacaattgcaggtgcaataaagtaagacattccagccccaaaacttacaatagccatagctgagcctttcttttcgggtgctaatgaacttactagagcagagagtggtacataaccacatagaacgattccaaaaattatgcctaccacagttaatgcccagaaattatgcccgaacatttgaggagtataaagcataaccagagtcattacaccgcaaccgacactgccaatccacataattgtctttcgccaacctaaccatttgtcactgatataaggaatgactaagttaaaagagatattggccacccacatagttccccatacttgtaaccattcttctgtactgtatccatattcagaggacaagtatagagggaaaaagattggaagagcacctacgccggtggagtttattatacgaacaactccgcctattgcgatttttggcttttcaatacaaatagttagtccactgagtaaacttttcaatttttccttgccattaccctcacgttcatgtacttggccttttacaacaacaactccaattaatccaccgattaacacccatacgaccgcactccacattaatccaatatatccgattttcggaatcatataagctggaaaataacttccaacaacataaagaccgccactccatgctgcccaaaatagccctattgccgtagctaaaatacgttcaggactgcgatacgtaacccaaactaaaaacgaatagcaaaataaaggataaccaaatcctcgaatagcataagtcggtaacataactgcataattatgcggttttagaccatattcaataaaaagaatttgacctactaaccagataaccaagcctgctatcataacctttcttggtccccatgcttctgtaaggacacccgaaaagtaggaggcgattgctaatatagctccgtatgctgcaaagagagtagaagattgttgaacggttaagccatgttcaataagatatggtgaaagccaaccatgttcgagaccatctcctaccataaaaattagagttgcgatatagccccaaatcatagctgatggaagacctttggtgttttgctctctttttgaaatcgcattcattttaatcacctcaaaattatatatttaacaatgctgatagtcacatttactcattagatggttctcttcaatggttaacgacaaatacccgattgggtatttatcgttaattatatagaaaatatactattacgcccaccacatttcagttaattgttctttaaattgtgcgccttttaataaagagatggccttacttaatccttcatctaacgaagctagcatatcttcatgctcaatagatatcacatagtcatatcctaccgcacgaagcgcactcaccatatctttccatactttttcgttttgcccatatcctacggatctaaatgtccacgaacgattcaaagtatcactgtaatgttttgtatctaataccccattaacactaatgtttgcctgatccaaatacgtatcttttgcatgaaaatgaaaaatagcctcttctcgaccaagttttttaatggcttctactggattaatcccttgccaaatcaaatggcttggatcaaaattagctccaatacttggcccagcatgctctcttaatttcaagagagtttcagggttatacacaacaaaccccgggtgcatttcaagcgcaatttgatggataccgtgtgactctgcaaatttcacttcctctttccagtaaggaatgactacttcattccactgccaatctaggatttgtgtatattcctgtggccaagagcaggttacccagttcggatttttggcacctgggtggtcacctgggcacccagaaaatccattaatcaccggcacttctaaacgttcagctaataaaactgtttttctccacacgtcatgagcctttttggcaaccatcttatttggatgcagtaaattgccatgacaacttagaccacttattgtaagtcctctacttgtaagggcagcttgaaatctttttaatttctctgggctctctagtaattcatcgggattacaatgactgtttcctggataattgcctgtgcccaattcaacggcctctacacccatttcacatagtttgtccagcatctcttcaaaaggcaagttttgataaagaactgtaaacacccctaatttcatgcacgtacctcctgctttaccttcactttcatccatttttgttgttcatgacttgccaaaatggcgtcggtaatgcacatggacatatgtccatcttcaaatgtcgcgaaagtcgctttatcacttaaaggatttttaccttctcgaataaaggtatagaaattcaacaatccattttttaatgcatctggccagccttcattatggccccccggatgatgaatggacgattttgcttcagaattaaataaagtaggatctgcaagaagagtttgatttggttgatctcgatagccaatccacagcttttctggttcttcttgattccaaaaagcagaattttgactgcaagcgatttcgaagcttagtctattttttcgccctgcacttacttgagacacagtaaataagccttttaccccgtcttcaaaacgtacaagaacagatgcatagtcttctgtgttaatcggaacatcttcatatgcttcttcttgtcctttttgtcccccaaaagtagatccttgagaagtagatttttttcttattggtataacagttgctaaatcagcaaaaacttcgacgatttttttacctgttacatattgaactgtatcacaccaatgagaaccgatatccgctaccgctcgtgatttccctccgacttcaggagctaaacgccaattaaagtctgtttcgaacaataaccagtcttgtaaataacttccgtgcactaagttgactttccctaactcaccgtttctgatcattgtttctaattgttttacaatcggaaattggcggtagttaaagtttacgccatgtacgacctggtgctctttagctaatttcaatagctcggctgattcttcactagacatagctaatggtttctccgataacacatgtttgcctgcttgaataatttctttattaatttgaaagtgaaggtgattaggtgtacagttatgaacaacttgaatctcactgtcttttaacatgtcacgataatccccataagctttcggaattccaagttcaaccgctttttgttctgctacttcctggccatgttctgctaatccaactacttctacaaaaccgagtcttctgatagcctcaatatgagtaggtccaataaaccctgtcccaataactccaacttttattttttccatttctttctccaccttaataaactgtattttccatgatttcttttacttacgtagtagctaaaaagagaattaaaacctttatatatagccgtttgctgacttgcctctattgatctgaatcacaaatcaacaactctatttctaataaaggctagtctactaggactagccactactaaactattgcttaagctttcactaaattttctgtaagattaacccatacacctttttcagctgattcaaggatagcatctgaaataacggcgatttgataaccgtcttcaaaatctggtgatacgcttgtatcttcagcaattgatttgaggaaatcatatgtttcaataatttttgtttccccgtacccaattcctaatgctgggattggccatagaccttctccatatggatgtgcaggtcctgtataaaccgttctgaatccgcggctatcacttggatcatcggagaaacatacttgaagctcatcacggcgttcatagttaaagtataatgaacctttctctccgtgaatttcaaatgttaagaagttgttgcgaccccaggcattacgagtcgcttcaatgcttccaactgcgccgttatcaaatttaattaaagttgaaaactcatcgtctacatcaactttaccttttggtacatcagtttctgcttttacagttcctagtttatctaccccgccactttgaatcggtctttcaccaatccatgtctttgcaatagccattacttctgaaatgtcacccacaagatatcttgcaaagtcaatcacatgtgttccgatatcacctaatgcacctgaaccagctcgctctttttggaagcgccatgataaaggcgagttaggatccgcagaccagtcttgcaggtatgtgcctcggaagtttaaaatctttccgattcttccttcctcaatatatttttttgctagagcaacggctggtgttctgcgatagttaaatgcgaccatatgtttaacacctgcttcttttactgcgtcaagcattgtttttgcttctgctgcagttcgtgctaacggtttttctgaaatgatatgtttacctgctttggcagctgcaatggcaatctctgcatgagagtcatttggtgttacaatatcaataatatcaatttcaggatcttctactacctttctccaatcagatgaatagttttcaaatcctaaacgttctgctgcatcttttgctaactcttcggtcacatcaaccactgtgtgtcgttgaggaactgctggtgccggccaaaaaaacattggcatacctgcataagcaagtgcatgcgctttccccataaatcctccgccaatcatacctacgtttaactttttcatttttattctcctcctatgaaagtagtctatttattctgatctattatcttttaaataacattttctatatcgttatggtaaattagacttcaagtttctaatatattatctctgctactttcttcctgaccttaagacttatttgccgtttcaaaacttaataagaagttaaaactgatttctgctccttttttcggatcattatagctatctaattctactgtaagccattcatcatatccaatttcatccagaacttggatcatttgatcaaacttttgatgtccttctcctaaaggaagaaattctccattataataatctttgaaatgaatatatttaatgcgatctgcatattttttaattacttctaccggattccctccacctgcttcgatatgcgctgtatccggacataaattaatcgttgttagtgccattaatttgtccagctggtctggggcctctacgtttgttcctaaatgcgggtgataacttggaataagattatatttctctgcaattactactactcgattaagagcattgcctaaatcagtgtaatcgctttctaaaataccattcgcacggatagctcctccgccaattactagatgcttcgctcctagttcagaagcaagagctgcaacctcttcaatttttaataattcttcttccaaaatatctggaaaaataaaattccctccagtgtaaactccaataaagtctaaagagtaacggttcagcaatgctctaaattcttcttttctatctttaaattccattagatttccgtcaaacatttcaaatcctttatatccaacttctgcaatatcctttaaagcttcttctgttgatccatttgcaaggtaataaaggtcttttatcgaagtgactccggcaggatgccctactaccccgccccacgtatttgtctgatatcctagtttcatggtttctctcctatctttaaagattccttatgagtacatggtgtattaatactgggatttcatcacctccttaaattaatttagataagaaataattgaatcaaaatacatgtaatcgattacaaagtattctagaaaaagactatattttttaatttattataagaagaagctgtgtttactacctgtatttgtaattgattgtacttatcaagaacccaaactaaaaatccctttttaatcggatattaagcaattctttttccaaccatttgtaatcgattacatcttaatttttaaaaaataagaagatttaaatcatcagatacattttcaaaagaactcttattcccttatgaaagatgtgttgagcatgaatcacgtatgataagctgatcttccattaaatattgatgtctttcaatttcttccttattcatcaactttataagtaatttcattgccatcgtgcccatctcaaaagctggctgtgagatggttgtaagagccggtttgaaaatagatgaaaattttatatcatcaaatcctactacggaaatatcatgtggaacacttaatccttttgaagaaatagcatttatagctccaaatgccatctcatcatttgctgcaaacacggctgttggaggatgattaagatccaaaaattgattcattatattaaaaccgctttcataagaaaaatcaccctcctgcactagaatggactcaactgtcaggttgtatcgtgtcattgtctgataaaatccttttaatcgatcctggcctatcactccatctaggggacctgatataaatcctattcttttatgtcccagcttaaccaaatattctgttgctttttgagccccgctgatattattaatagaaacggtggggatggctgaaccttctatatattcacatgccaaaactacaggatatttgagagccatttcctcaatgttcttcgatttcattctcgccgttagtaaaaccattccatcagcttttttttggagaagtatatttaaatacccattttctctttccaaatcattgcccgtatccccaagcagaacttgatatccgtttatgacggctacagactcaattcctcttaataccttcgaaaaaaaaggatttgttatatcaggtacaatgactagaatggttttggtttctaatgttcttaactggcgagctaatgcatttggctgatagtttaattctttaattacttgtaatactttctcagtcgtttcttccgttacagtgttaggtttacttagcactcttgacactgtagcagttgaaacatttgctttttttgctacatctattattcgcaccattttacgactctcttttcttgttcttctctataacagaattgtaatcgcatacaaaaatattgtctaattggattcagacaacattttctgaggttcaaactctttaaaaatccttttaagcgtcgtttttatccatataaacaaaaaaacaacaaattaaaaaaactcagcacttattgctgagctctatgttttataataatttgtacctttgcagattgtctactttatgcttggaaatccttgcagtttccttataatctttaaaataggctttatacatttgacccgttgcttcaattcttgttaaaagttccacatttataatataagatctatgagatatcataaacctagaatcaacggcaccttccaagctagttaaagcttcatttgtctcgaatttaccatttttagtatgaataacagatttccgatcaagtctttcaataaagataatttcttctaatggaataaacattatatttttctgctgtttaatcattaaatcctttttaaatgaatgttctttatcgactagtgaaatagacacttgggaagctctctctaaagcaccatataaacgatttctatcaattggctttaaaatatagtctactgcctttacgttaaatgcctcaagtgcataattatcatgaccagtaataaaaataacttgtaaagtcgggaaaagttctttacatgctttaaccgcttccatcccattcaataagggcattccgatatcgactaaagcaagatccggtttttctttcgtaacatagtgtatcaattcttcaccgttggcggcctctccaacaattttatatttggataaactcccaataaagtaccttaacaattttcttgaggtaacatcatcgtctgcgatcaatactttcatcttgttgttcccccttttccctagcgtttcttgatttcgcaacactttgaatactatctggagcatcttcattataaacgagctgccaagcatcaattacattttctttcattacttttagagacggaacggctacatagggtggcgcttgttttccaagtagggcataccctgctagaatcgcttcggcgactccttgctggtatggtagctgggcacctagtcctttaataggtccatcctgtgcaatttccaaggcgacgttcatacccaaatccattgtcgtaatgactaaattgcttttttttgcagtacgagttgccctcaaagctccttcagccggtacatcccatacaacaaaaataccatttaaatcctgatgttcagcaatcataccggatgccactttttctccatcattcgaatcagtaattcccctgcgatcgacaatttgaatgtcagggtacctttcctttatagttttttcaaatgcttccgttctttgtttggttgcaaaaaaatcagcatcatggtaaataatcccgaccttaccctttctatctaatttctcagccatgatattagccgattcaatgccatttccataattgtcagcagaaacaatacttacataatctttcccatgctgcaaaccattcggtgtattgtccataaacaccagcttgacaccagcctgggctgctttttgatatacacttgcagttaattctggatcaactggaatgctcaccaggatatccggttttttggctaaaatgctttcaatgtcagctacttgctttttccatttaaattctgcatttgtcacggctactacctcaatgcccattttctcaaaagtagtttgcattccttccaattgagaccttgaccaatcacttccagtataatgcatagcaatagcagccttatatttctttttcttaattttttttagctctttcaaagataaacgaagtgtttttgctgaggcagcttcctcgccatgtggtcccgtacttaaaattttatgatctggaatattttgattaattgtattgtttagcgtttcacttaggattgtcaaaaactcttgtacatgaatgggctttgttaaatagttatcaaatcctttatctaatgtatattgaatatcctttggcattgcattcgcacttacagcgatgacagcaatatctttcgtttctttgcctgcttttaaaatttcaaatacttcatatccattaatatctgggaggttaatatcaagaagaaccaaatctattttttcgtttgctacaatttctattccttcttttcctgtacgagctgataagagcgtataggaaggctgcgatttaatgatgttacttactaagtgcaagttggattcgttatcttcaatatatagcaaacgatagttatcttccttcctattatttgttggaggaaattcagtttgttcaccccattgtatgacagtctttgaatcatttggaagaggaaggctaaaacaaaactcacttcctgttcctttattgcttgttacattaatatccccacccattagatgcaccagctgtttaactaaagataacccaatccctgtaccttcttcttttgtattttcgattcgataaaatggaacaaacactttagtatattcctctacagaaaaacctacacctgtatctacgatatgaatgtactgcttattctcttgtaaacgacagaaaacaatgacttttccattttcttgattgtatttaatagcattatcaagtagatttagcaatatttgtttaagacgtataggatcagcaagaaccatcatatcttcccattgatccagttggctataaatactaatattcttcttcttagccaatggttgtacaatattgatacattccttgatgacagttaaaagatgaacttcctctacagaaatctttaaatttcccgtttctattcttgacacgtctaaaatatcattaattaaacttaataaatggcttcctccacttaaaatctcctgtacaaaatcacgctgttgttcatttaaagattcatccatctccaataattgagcaaaacccagaattccattcaacggagtacgcagttcatgactcatcttagacaaaaaacttgatttggccatgttcactttttcagcttcttcttttgcctgaacaataactctttccatttttttttgttctgtgatatcctcaaactcccacaagtagcctacaaaattatttttctcatttaagggaaaacaattgtagcgtagtgtcatacttgtatctattttaatttctttcgtaatttttgttagtttttctgtatttccgagcttaattttattaatttctttatcaaaaaggtaatgtaaatccgaagcgtgcatcccaatatggcaatcaatttcacccttcaactggaaaagttcataaaatttcctatttaagagccttatttttttattgcaatctgttactgcaatcccactatctaaccaatcaatcaaactacgctggaatgcataggaattcattaatttttgttcttgttctttttgaagaatgtcctcttccataatctttttgttagtaatgtccacacaagttccgactacttcagctactttatccttatgaaataaaggtcttaaataaattacataataaatacctctaaatttaccttcatattcaatgtactgtcctgcccatgcttttttgtaataactgtttagcaaattggcagtgtcaatatcatcccaatacaaatcatgaagcgtctttccgacgatatcctctcgattaacccccaacgtatacagtaattctccctcggcaaaagtatgaataaactcgttacttctttgtacaaacttaaaaatcatcccggtatcagtaaagcctggctgtgaaatatatctgaaatccttcatttgtttcgcccctagttagttaaaaaaatataatatggattctatatgataaatcccttactttacgttctttacagtgcttgaagattaatttgaaaccaattattcattctaatgattattgtaatcgctttacaaattatacttttattattataagcttcactatattgattagtctaacaatacttacccatgaggctgtcacgcttttattaaagaaggaatggatcaaaacagggggcgtctttttgacattcttaaaaggaaagatatggatgttgttaatccttctatagagcgtcacatagaagcatggaattatgaatgtcattttccttcatctgttcctgctgctatcgacgggttatcaaagccccagtgaattcgtttcacatgtaaatattttacacacagatactctactgcgtgtccgcatagtatcacaactaaagcagcattattaagaatttcaggattaattacatgagatgtttggtttgagatatcgattcctacttcattcattgtttttacggcattaggatttaaagcatgaacttcaagtccagcactttttacctctcactatttcccttgatactttttagcctaaccttcttccatgtcatatttaaatcaaaaagtttgatgtaattaaaagagttcttgttcgactaacctatctgttagctaacaagaaaaaggaccaccaaagcgtttaaccctaactattaccaattaattttccggattatatgtacattataactacttaatataattcacctataaaaacattatagaatgtttcctccaatattcggaacactaacattgtattcacgtaaaaaaggagggtaatcagaaatggatattcaaaaattagccgatcatgagtcattggatctacatgaagttattaattttaaaaccctttgcttagcgaaatcaaaactaatgcaaggacttgtatttgatgatgatttgagagcattgatgaaaaaagatgttgaacaatcgatacaagcgctgggagaattacaggcagtttatcaacgtgcaccttttgaagcccctgttcctcaaaaccggccaacaccaataatcaattgaaaaggaggtaaattcagtgaatcatgactatttagatcctataaactcgctacacgtaccagagctcgcagatactacatttgcgatggactttcttcttcgtgccaaggaaggtgttcgcaatatcgcagtcgcattaacggagtccgcatcacctgatgttagaaccctcttacgagaacagttaatgcaagggattgccatgcaccaagaaattacagaactaatgattagtaaaaaatggttccatccatacgaattaagtgaacaatatcaactagaccaactctctgccaacaatacattgatgattggcaaaatgaatttatttcctgttgagaccaacagaaaaggtctgtttgaccgaacacctgatgaacactaacactggaggatatctatcatgaaggcagtaacgtatcaaggtattaaaaatgttgtagtcaaagaagttccagatccaaagattcaaaaacgagatgacatgattattaaagtaaccagtacagctatatgcgggtctgatttacatttaattcatggcatgattcctaacctgcaagaaaactatgtgattggccatgaaccaatgggaatcgtcgaagaagttggtccagatgtgacgaaagtaaaaaagggagatcgtgttattattccttttaatatagcatgcggtgaatgtctttactgtaaaaaccatttggaaagccaatgtgataattccaatgataatggtgatatgggtgcctatttcggatattctggtacgacgggtggttatccaggtggacaagctgaatatttaagagttccgtttgccaactttactcatttcaaaattccagagacttgtgaagaaccagatgaaaagttagcagttattgccgatgcaatgactactggttattggagtgttgacaatgcaggcgtaaagggtggagatacagttattgttcttggctgtggtccggttggcctttttgctcaaaaattctgttggctaaaaggagcaaagcgtgtcattgccgtagattatgtagattatcgtttgcaacacgccaaacgtaccaacaaagttgaaattgtaaatttcgcacattttgaaaatgcaggaatgcatttgaaagaaatgacgaagggcggcgctgatgttgtcatcgatgcagttggtatggacggtaaaatgactgatatggagttccttgcgagtggaatgaaactgcagggcggagcatttggtgcgtttatcatggcttcacaagcagtacgtaaaggcgggacaatccaagttacaggcgtttacggtggcaaatataatggattcccaatgggagatattatgaaccgaaacgtcaatattcgctctggacaagcacctgtaattcactatatgccatatatgtttgaattagtttcgaccggaaaaattgatccaggagatgtcgtgagtcatgtacttccacttagtgaagcaaagcgtggctatgagatttttgacaccaaaatggataattgtataaaagtcttgttaaaaccttgaggaaggaggtagaaaaaatgaattacgctttacatgaagttcttgaggtccatgaaatggctgcatttaagaccaattgtttgactaagtccaaaacgatgagaggattagttacagatcagcaattaaaagatattatgcagcaagacatagatgtatctacgagacaattacaagaatatacttctatcctttccaacgctaagcagtaaaagaggagatgaatgaacatgaatccaattattgaaaatttaactggcatgaatgccctatcggatcaagtggttgcaatggatttattgattgcagctaaaagtggagttagaaattatgccatggcagttacggaggccggaacgcctgaaattaaagaaatgctcactcgccatttagtggaagctcttgatatgcatgaacaaatttctgcatacatggtggaaaaaggatggtaccatgcttgggatacaaatgaacaaatcactttagatttaaataatatcgatacagcgttgaacttacctactctataaaaataaaataggagcagtttaacattacccacctaaactgttcctaataaaccatttatatttaaataatggaattctttaaagaaaagatatccaatacgattacaaatttgatgtcttttcttttagaattagagataaattaagccaattacgaattattggcttaatgcttacccgttcaaatataaaaaaatgaaccaattattctttataccaaatagtagtataaggaaattaatcaattttcatattaagtaaactataaggttcgtgtcctaaatcttttctagaatgaaatctagcctgcagatctaattgagtcaaaatgacataccaattaaatcaacttattataaaaaagccgagaaacgtaattccctagcttttttgagtttctatcgcttgtttaaccgttgcataggttttaatagatgagaaatcaattccatttctaacaatggtttgggccaattcaggtcctataccagtcatcatcacctcaataccttgtaagcggagaacactgtaaatatcaaagaggtaacgttcagctatagcgtctatagttaagatacctgagaaatcaacaattagatactctaccctcatttcaagaattttcaagataacattattcaagatatattccgctctttctgaatcaatagatccaattaatgggagaacggcagttttatcttgaatggggaccacaggaacagataatttcaatacttcttgctgcgtcttctgaataattttatctttcacttgttcaaatattataatggtttcattaatacttatatcgagcaaatagttaaatcgtttattaataaatacaacttcttctgaagaaagtccatgctctatacttatgttagtaaggtaatcgatgaagactaggcgcgtaggaggatagcgtgcaataataatagagactctctccccttgagatgctgtacgcttaccattggtcttactccattcaacaagcccttcaggtacgttgttttcactactaaagagactctttcctaaaaacttaataaattcagtatagacgataattgcttgttcaagttcctcttgtaaagcctcaaaattgggtttctgagaaatttcttgcacaatttcatttgctaacatttctgcattatcatctaagtacttagcaacccctataatccctttcaataattgtcactccctcattttcttattcatgaatgcatttaggcagtcgttttatttcttgctttcctatttattgttttaaaaacgaataaggagattttctgtcgccttttgtaaacttgattttatagttaaattattgaaatcaatagcaatacttacagtagtctgtgcaacttccggacgaattcctgttaagactgtttctacacctagaagctttaacgcgtctatcactttgaaaatcccatctgctaccatggtatctataatataaacactctataaatctactattaaacgttgaaactgtagtctgttcgctgatttcaacgcttcctccattggataattggctctttccgtatctatatttccaatgagaggcaaactaaaaatagccattcctttagctaaagggacaactgggaccgataattcaagaaaggcggctttgcgcacgttcaagggttaattgatagaaatgcacataacttaaactaaaggaataagcagcatgatctagcagaggatcaataattccgccgacttcaaataccgtatctattgatagattattttcctttattacttccttcaatatcttccataagaaagtgcgataatcttttgtatcttttaatgcttcatccaatggcaccttcaaattgcaaaacatttcctctgtttcttttccccattgggtaaatttttggagtgctctttcttcatttaagtaatccctaagaacttcaccaaatagaattataaagtgagctcggatattaataagttccacttcgaaaggagccaattgtttttttcttcttctgtaatatcatctattctattttcatgtacttcattagcgatttcaaatctatattctaagattttatcccctaaaaatcctatttcatctttcatgatctcctccgaaaatcctgttgaggctattaattaattttttatattaattatatcaccacatgtcaaaatacttatttttttgttaatttctcagtataaagttctctactctaatcttcataatttattaaacaatttgttacaaaggattaaaaaaatcaaagccgaattcaccttctgtgatatgattaatccaataaatagaaatcttgtatgctatacacnnnnnnnnnnnnnnnnnnnnnnnnnnnnnnnnnnnnnnnnnnnnnnnnnnnnnnnnnnnnnnnnnnnnnnnnnnnnnnnnnnnnnnnnnnnnnnnnnnnnttactaaaaccactctgaggtgaactatgaaaacaattaactctatatctagttctaaaaaatttgataaaggtcatgtcttttaccgttttgaagataaacaattttacataaataatttaatgcgttttattaagaatggattagagagtaaacaatgtatattgataattgagaatatgagagcacttcccctaataaaagctactattgataaaaagtttagtcataaacaaaaagaatctattcgtttagttaataattttgattattacttggcaaatggtgattttcacacaaaaactattcttactcattttcaagaagatttgtctatattgaaaatgaaaaatacgatgataagaacatgggctcacgtagaatgggcttcagagaaaccagatattcttttactagaagaatttgaatcaactgccgataattttgttgaggaggagggtatagtttcagtttgtgcatatgctgctgattctttatcttctactttggatactactctgcagcaattacatcaatatattatgacagatgataacctttttatttctcccctttacaatggatgaatttattagaagtgtggccatgaattcactttttctacaaaaggaataatagttaaaataattttaacgaaaatattttaactattacttttatttttaaagtagttttattcttttatttatattatattttaatattttaccttttacagtaaatgattattctatgtatataaagcttctatctttccctttataagttccctatccataatataaactctaaagacatttcctgttttttaaattccttcttctttttatttcgttgtctataaaaaattctaaagatattttatacaatacaaaattaagttttttaaaaatgtataagggaataaagtaaaataagaaaattagttaatagggggttttgtggtgaatataacagaaataatgaccaaagacgttgagacttgtgatcttaaaagctcttgtggcgaggtagctaatctgatgaaaaaattagatgtaggagctattccaatttgcgaaggcaataagctagttggattagtaacagatcgtgatttagttgtgaaggggctagcaaataactgtaacgctaatacaccgatagctgaaatagtaaaaccgcacgtaatcaatggtactaaagaaatgtccctagaacaagttgcagagataatggctcgttatcaaatacgacgattacctattatggaaggtgataaactgattggcattgtttctcttggtgatatagcaacaagtattgaagaaagtaaaaaagcaggtacagctcttgaaggtatttcaacctcaattaaaactgaaaatttaaaatagagattaagaaatttcaaatcaagaaagagaaccactgcttctgtagtagttctctttctttttatagataacatttattaccctatggttcatttagctcttttattatttgatgttacatgctcgccttgttctttaatattcacttcttctttccttagagtctccgatactttttcattttcttctttacgtcgtttgcccaccactacttcttctgttaccacaggttcttttgatacggtcactttctcttcttcaagggggatacgaacagattcttcatcttcaataatctgtgtattggctcgtttatccgatacaggacgacgctccacatatacttcatcatgctctacaggaatactgaccgtttcttctttatgaagaacctccttatcgacttgaacttctcctgtttggactctttccttatctacatgtaattgttcttcttttaactcaatatgttcttctgtattctttggaacgccatgttcatgttcacgatgttccccatataatgatttatcataaacagagtcacctttggcaaaagaagaatcccctctcttttctaagaaagaatttgtttttgtctctcgattagcatttactaacaataatacctttcctttctgtaaatcatctgcataaggacctgcttctgtgagtggaacacccaggttaattaaacgttgttccactttagctttgtctttatgagtctcttgatggtgatctggtgaaaatacatgtttaattttctccataatcgattcgtcttgatgacctgtctccgtcgtttcaattctctttacgtcaatcccctctttgttttctacttctagataaccctcatcatctatatcattagtggttacgagagaaagatctttctcttgaaatccttgagtctttaagttttgaatggctgtgaccacagcctcctcattttcgtaagtacctatcacattttttgtcattagtaactcctccttctattataaaaagctatttagaaaactaatttcatctgtgttacttttaatacccgcatgtccttttataaaactttttttggaatagtaaaaaacatccaaatttgaattagaatacgattaagggataatctataagttaaattgaacgaggtgctttttaaatttaatggataatccttaagccagtaaccgacatctaaaaatacaggtttattaagctatcacatagggaaaatgagttcaaagtttaaataaaaatagagaggagcaagtggaatgcgacaaaaagcacttatttctggtcttgctatttcaacagtaagcgtagggattacaacttatttattgaaggataaatcaaacttagataaggtaaaagggtttgttcgaagtgtaaaaaaagctattccatataagtcatcgactcaaaaattgacttcgttccctatacacaaagctggtcatccagaccctatggacattgaagataataaaatggtctcagaaggatctatgttccctgtacaatattataatgaaaaggaacagtgaattatcaacctatatcactaactatattaatatacttgtaaaacagtttagttgcatctcgagcagattttaactatttgaaagaggtatgtttcatcatagttatatctgctatttcaattccaataaatatatttgtaggtctcatatcttaacttagaatgtttaaatcatagttgaaatgtccaagaagataggtagctagttattcatatcacaaacttcaattaaatagcctgtatgtgattaaggaggttttttaatggagaaaataagagctgtaaaggatggttatgaagtaaaagaggctattgaacaatttttaagtctgggattcagaaaggacaatatctacttattagcacatgaaagagatcgcactgaggaattgacaaatgtgttaaatacaaatgatatcagtatatcagaacctggagacaacaaaccaatggcaaattcacttcatttttataaagatgaactacacactaagctttactccttaggattatcagctgcagaagttcaacaatatgaaaaggaattgaattggggccgtatactagtgattgcaacaaaggcagatgatgtttctcctattgagtaatatcagaaaaaaagctgtacaaactttcttcaccggttaattaaagaaagtttgcatagcttttttgaaaaaatatatatttcccctgaaaatattatggtctttatcaaaatgcaaagcattatcattaagcaaaaatataaaaataaaaaattgaaatttgttgtgataataaaattaccttgtgaaatataggtaaagaagtactctaaaaccttaagtgttttataaatagtttttaactttaaataaatatattttcacagataacgtcttaggacgtttccttttcagctttctctatttctcccctaaacttctcttcaattaactgtttatccccatacaccaataaacgatcccctgcttgaattttacaatgagtaagtttctttcttattcttaactcccctcgcattaagaaaagtactaatatgtcttcatcttcatgtatgcattcattcactgactttctaatataggatgactcctcatcaatttttatttctaaaaggcaatctgcttcattagttaataaaatttgatttactggtaattcgtctattttaaatgattcctctgattcttcctcaaatttatctgctaaaactttttgaaagaatggaagttttagaagaaaaaatatgagaagcagtgctccttctatatataatacttttggggttagcacatcatttgataatatactacttaaagaagagataataacggcaaacgaaaaagcaccaaatagtattaaaaaaatacctaatcttcttctaaaaggatgacctaaaatcaattcggattctcctgtggtaaaaccagttcctgtcattagtgatattacttgaaatcgagaaacaggcctttttattccagttattgtaaataaaatagnnnnnnnnnnnnnnnnnnnnnnnnnnnnnnnnnnnnnnnnnnnnnnnnnnnnnnnnnnnnnnnnnnnnnnnnnnnnnnnnnnnnnnnnnnnnnnnnnnnnatatagaataattaagaatggagtatttatagatagtttttcttattccgtttcttttctttaatataggacttaacagcttgaatagctattacgctagaaattccaattcctgataatgctacaagtaaagcgatatcttcaaaaatcgtgtagtgtagaaccttatcccatttaattttcccttcccaattttgaatcactagattcattccataaattccagatacaacagtatatagagttaagatttgcaataaagaattatgcctttttgaggtcattctctcctgatttttatataagtcgttaagggttttatttacctgggtaaataagttatctatgcctagagattttttgaaataattagaaatctcttttccagctaacctgctgtttatttcaggattgtatattttagcagaaaattcagttatttgaacaataagagtatccacttcaacctcattttgtcccttatgaattcttctttggtcatatgtgagtttcataagaatgattcgataatagtaaaaaagaagaaatgagtaatagtattgcccaaacatttggttggcgagcatgtgggcaagttctccttgagatttggttatacatgcaaacatgtaatctgttaccacataatacgtttcatctgcccacctatcgtacacatgatcatcataaaatcgctccatgtaagcagggttttttgctccgataaatggatgacctttgttgtcaaatccacttatgcttcctaatcggtaaaggtcttgaacttcgagtttgctttcttcttgcaatactatactgcctactacatatagcctttcatctatatagaatggtaggcttccaaaataagaagagttcgtatttttttcatcaagaaaatttttcataaaaggacataatgattcaaaaatgaaagattttatcattttataagattgattttttgtccctatctggatatctgaatcttcctctacaagaggttccatcacacgaaataaatcagtgaattctattacttctgagtaagacatgttatcaggtaattcaacgcgtatattcatcatgcctatttgaaaaggacaaataataatatctatggacaatagttgaaaaattgtttgaaggtactttccttttaggaagaattcctgattgaatgccttagagaatcttctaaaaccttcttttttggttgagtcggatggaaagataatgggttcaatattaggtagaaaaattctctccatacgataatgtgaaacggtatggtggtcaccatagtatttatcttgtaaatgggaattatcaagtgtaaaaaaatcatagccttgttgttggagtagttgggataagctatctgaacactcttcttttaaagtaaatggaaagataaattgcagatatgccttttcgacctcaaactcctttatagattggtcttgttcgttgaaatttggcattttttgctcctttcttcaaattaaagattgataaatttttcactttaatttattaacccttctgcaagagaatttccacctcatcaagagaaatagaataattatatagatgaacaatatgtcttagaaaattcttagtgcatcgttactttcatattcatttttctaattcccgtttatcctatcgtaacaaactggtaaaaagaggatagatcagttaaccctcttagattttatagctacattgttattgagtaagctcttgggtaatgctatctatgacaaaaatgttagaatcactgaatttttatttgctacatcattttggggaattattgttttcttagtagaatttttctcttataaatataaaaaaattagaaaaatagcagagggcattccttcaatcttaattaacaaaggaatgatagactgaaaagaacttaaaaaaataaaatagaaatgcaagaattaatggaaatgttatgggtcaatagtgtatttttcaatcaagacgtacaatatggaactatgtaaaataatgaaaaaataagtatcatgaaaaaatctcgacatagtaaaatgtcgagatttttattaagtcgagatttctatataagtcttttttacagcatcccactgaaatttcccttcttctacaacaaggtgatcttccggattccagggtaaactttctttagcgacgtctaaacgtaaatgttcaatacttgctggaggaagttcactatcccactcatttagcccgataaaataaatactaccttgtgctaatacatctggatgtaaatgaacaaagattgtttgaaattctatcttatccaactgttccatttttcccacccctttagagcactttttaccttttagtctagtaggttgttaaagttttagtatcttatactattggtttaacattaactcttcttatatttattttcagttgaggattcatttttagttttctttttatttctttcgtcttccttttctatctttatttcttcaattggtatggagtcgactgtttgttcaattttaaagcgatcaaataaggttttattctctgtaggatagtgctcagcatgatccctgctttttgtctcttggggatgaggggacctttttcttgattctgtcattcttttctccccctgtgttgactgtatacgttcatattaatctcctcccataaattaagatattttacctttatcctaacagggatagctttaaacctgggcctatacttattaaaatttaaattcaattacaaaaatagataatgggggtgttttcagaactatttttcctgatctatattgtaagctgtttctttataacatcatgcatcgtaaataacataacttctatctcaattttgctgttggtacatggaataatttatattttacaaatgagcaagctcttcagataatttttttgctttagcttttaattgttctttttgaccttccaaatccgccattacagctagaacctctttattatcaggttcttctctaaattgatttaatacagcaacaagggattctgagactttgattaaattcttgttcacttcatcctgcttttttaaattaataatttcaaatttctttttttctatattattcatcttcctacttcctttcttttaatatataactgaggattaattacttagcttttaaaaatttaaagtccgtatcaaaaatattgtaaatataggttctagagaatacccgaactattaaaaacttgtaataatatataatataatacggttttcatcttttacattgatgtatcttgagcttggttttgaactgtagagattttgcttctatgatatgctgcatttatttctccacctataacaagaattaagcctgttaggaaaagccatagcataagcacaatcactccccctaaactcccatatgttgttgaatagctgccaaagttatttacatagaaagagaaaataagagatgttaattgccataagatagttgccacaactgctcccggccatacatgtgcaaaagggaatgtcttgttaggagcaagatgatataagatagaaagaatacatatcataatcccaattgcaactatccacctaagtatgtctaaaataatagccgtccctggtgggaaggaaagccattctcttaacatttttaaaagaatacctccaaaaacaggaagaacaagggctactaaaagcgttaagattagcccaattgttaatacaattgatagtaatcttacttttataaacgaacgagtttcttccacatcaaatgcttgatttattgcttttataaaagcatttataccatttgaggcagaccatatagttcctaagattccgaatgttagaattccaccactgggtttactaataaattgcactacattttctttaaaaatagtggcagtttcccctggcattacactttgtaatatatgaatggcttccttcgtttcaatagataaatagggaacaatggataaaagtaaaataagcatggggaaaattgataacatataataataggcctgttcagctgcaagttcagttgcacggtcttctttcatttctagtatgatttttttactaaaagatataaccttattcattacacccctcaactttctgaagtattatttaaaattcttttcccattatttaaaattttcaatctaaaaattatataatgcttcaaaaaatccacatttaaataaagaaaccttttaagaatagggtttacaggaatggtcttatatatcttaaaaataggtgatctttatgattaatgacatattaaaaaatttatcaatactcaatgttttttggttcattattgatttgagtttaatccttttgggaaatcgattacttcattggacagttaactttgtttctaaaaagaagacatatccatcaaagaactttttcaattctattgtttctttgttaaattggattactatctatgctgtaatttttttattcttattctcttttcctaatagaaaatggatgttccgccccttatattctcaaggagaaatagatgtatcattctttcttattttaattgtaattatgagtatattatttgctcataaactcattaaattattgactacgcatgtattgaagccagtttataaacnnnnnnnnnnnnnnnnnnnnnnnnnnnnnnnnnnnnnnnnnnnnnnnnnnnnnnnnnnnnnnnnnnnnnnnnnnnnnnnnnnnnnnnnnnnnnnnnnnnngtttataaacactacaatattaataacggtttaggttatacatttaataaaattatttattatacattgatgattatagccttaggaataagttttaagagcgtcgggattgacctaaccggattagggacaatctttagtgtgctcggtattggaattggttttggaatgagaaacatagctggaaattttgtgtgtggaattattattttatttgaaagaccaattgaagtaggagaagttattcaacttaatgaggggattgggagggtggaaaatatcagacttagatctacaattattcgaactgctaaggaagggactttaattatacctaatcaatattttattgaacacattattaaaaatcgaactggatctgaaatgatagcagaagttactgtaagtgtagaatatggagttagtacagagaaagttgataaggttctccacgaagccgtatcaaaagttaaaggaaaatctgaagggatattaaatgaaccaaatcctactattcgatttgtgaactttcgaaatagaactatggatttcttagttgagattccagtaataaattttgagattaaagaacaaatagaaagcaagctaagacactctatagttcaaagttttacagaagaaggaattcatcttgcgccttatgaatttagccaagtccttttaaataaacttgaaaagtaatagccgagaaataaaaagaagacattctaaattagaatgtcttctttttattatagatgcacgagctacatcaaatccatcaatctgatatccaataaaaggagagtgaacttttaaataaattcattcttttaaatttgagagtttattcattatttacttgttctttgatttactattgctttttcaatagtgttattcaatgcttctatagtagaaaaaattcttttaattccacttatacaatttctctttgcctctgaagggttgttttgtaatataaaagatttatttgtagttactttttttatatcctttacaagtttatttactttagtccttgttccttcatttaacatagatatagctgcttctccaattatagtacctattgttaaaccttttataaaatctctatttgcaaatttttcggtcttatatacctgttctttcataaatctgttacctctctttatataataattatttgtatttttaagctgtttgtttctttctcttttaattgaaagtatttgcttaagtatcgcatagaggttatttattaatatgttgagttttcataaacgaattttactatattttctatataaaagccttcttattataagaatgcgaataaaatggccttgttttttctatcaataaggttttaataatacgtttaatttattttttccagtttaataatccatcatcttcatcaaactcgattaaaacatcagttattcctttttctgttaaaatctttttttctaatcgatcttttatatcatccgcaacggcgactgtcaaggtaggctcaatttcaatttctatttccacatggaaatcttctccttctttaataacatttatcccttgtatatctttgacatcgggatccctcattactaaagaacctatcttgtcttccattttttcatcagcctctcctattgctccagcagcgttatctagaaaaacctttccaaccacaaagaacatcattaatccaattaaaattgaggcaattccttcagcttgatgataagatgtgaaattagaaattattactgcaataatagctaatatcccacctcctgttgctactaaatcttccataaaaaccagctttgttgccggttttgcatttcttaaccttttaaagctttggaataatatgtttatccctttaacttcaatgtcctcatcataaacaatctctttcattgctttatatagaaccgttgcttcaagcataacggcgatgcctaacacgctaacatttaaaataaaacccgaagattccgtgggatgtagtatatgacgaaaaccttctcttatggtttcaaatgacataattcctacaattaataccgcaccaagtaaaactaaatttaccagccttccaaaaccatttggaaaccgagctgttggtgtttttttgctaagtgctgaacctataaaaacaaaaaattgattggcagcatcccccagactatgcattgtttctgcaaacatagcaacattacccgttagtataaaagtcgcccctttaatgattgcaataatggcattaactatccctgctaacagtgcagacttatttcctttttttaataatcgaagcaattctcccattttctcacgctctctttggtttctttatatttaagttttttatcctgcaatgaataactactaagtaaaattcttcatctttcaatttccttttttctgaatagaattgttatagattaatatgcttttacatgaggtggccttatacagaagtacaatttaattagtattcgcactcatttttatatgttacttattctcttatttgggtaaaagttaattaaatattttaataagggggtgaattaacaatggaaattctatggatgctaattgttggcggaattattggttggcttgctagtttaattacaggacgagatgttcctggggggattattggtaatattattgctggctttattggcgcgtggttaggcggccttatctttggagattggggtccagtcgttggtggctttgcaattatccctgcaattattggatcaattattttggtgttaattataagctttattttacgaaaagtaggaaaaagaggtaatcagacccaccatgatcatgcataaaagatagaaaagtttcaaataggagtggctaaaactgagaaagaaaaaccaatttataatatcggactttaccgaagaaaattattttgaactagattcttatcttacttatttgtttaaacaaattaataatcatgctgaaaatgtatcagaagcttaatgatagtnnnnnnnnnnnnnnnnnnnnnnnnnnnnnnnnnnnnnnnnnnnnnnnnnnnnnnnnnnnnnnnnnnnnnnnnnnnnnnnnnnnnnnnnnnnnnnnnnnnnatgtatcagaagcttaatgatagttaaagtgctttataaagagaaaaataaaaagagattaaatgagggtataaaataagcgaccttatattctaaactaaacgaatatataaggtcgcttactaactattatggttaattttttaaaaaatttcgattgttcttctctacaggcgacgattcgaaaattatttgcaccttttcaaaatacatatgcaccattaaatgaaccgtccaaatcacatacctctaatgaatcacctattaaaatgatgatgtcgaatccttgtcctagaaccaattctttctacaaaattaatttaatatgctaaaaccaatttctgcaagggcttgttccaatgtggcaagaagatcaagtattaaaaaaagcgatggatgaatgggaacgtgtaagtcaggatcctgaagtgctattagcatatgaagctcgaagaaaagcgttattagatgaaaaatctgcattaaaaagagctgaaagaaaaggtattataaaggtagctctagggatgattcaaaaaggaatagatgaagagactattatcgaactaacaggacttacaaaagaagaaatacaagaacttcgtcgacaataagtgaaaagaaataaaaagagcattgttattaatacaatgctctttttatttctttcctgttaataacttgttttctagctttactacccatttataataccctaatgcaataagtagaagtacaggatcaatgatagctgaataccataaattccaccaaccatagtggaagtatccccaaggttcagggagtaatgtaatcatttcataaagcaaaatggctaccatccaaaagataaaatagcaacccttgtgaatgattgacattttaaaaggataccaattaagaaatatcatattagcaggtgggagtaatacagtatgagtaagaactcccctccaatctgcgttttctgtaaaataccaataggcatgatatttgagatctataaagacatcaaacatatgttgaaaagcaattgtaaacatccaaatatgaagaatttgatttgctgttagtcttttatttgttttaaatgcaataaaattaaatacaataatggcaatagcaagtcctatcatggttttttcctttttaattaaatataccatataattacatataatgaaattaaaaactattaatgaattttattactttaggtctttctattctaaaaacnnnnnnnnnnnnnnnnnnnnnnnnnnnnnnnnnnnnnnnnnnnnnnnnnnnnnnnnnnnnnnnnnnnnnnnnnnnnnnnnnnnnnnnnnnnnnnnnnnnnaagacaaaaattagtcgtttttgttactgataactcaaaagtacaaggaagctctgaaatccttaatccctttatattgatttatcaaggatataatacataatctatgattaaggctgtctaatgtaaataatctaaaaacgtatatcttgacggacttttattggttcttgtaatccgttttatgaaactaactttgtatatcatatacagcctaaatacaaaaaacaactggatccgttcagttgttttttctgtttcatgaatgataatcaatgtttggctgacgttgcagaacgtcttaagtagtttgctcaagagagtaaaaaatatgtatttacatttatgttttgaaacatacacaaaaagggaaaagtaacttagttttattctaaatgaatgttaaataagaaaaatggttaatatggggaacgacctatattagtgaatcaggagggaaggtatgtcaattaataaagaagttttataccggggtaaacgatttaagattattcatatttatagttctggttattgtaagcttagaaaggttattgtaagcttagaaaagttaatgatccttttaaagtagaactagctttattgaatgatatcctactaacaggataatgattactgcacattcttatttaactgaccaaaccgacttcatttgattttgttattaatgaaacatattaatcatttttcgataaaagtagaagccaaattccttatatataaagaatttggcttctattaatgttgattatcctaactaaaaaagtatatggtatcgagtgtaaaaacagaaaaattcagttttacaaacaattagtcgttatcacgtttgttagtggattttccgcctttttcaccgatttcctgataaaattctttatcctggtttttagatgtagcttttccacctttttcgccaatctcctgataaaattccttatcatgatttttggctgtagtttctccgcccttttcaccaatttcttggtaaaattcttggtcatgatttttagatgtagcttttccacccattcttccagcttcttcacggctcattttgtcattatttttattagttgtcattttacattcctcctaataatttttaatatgttttttattttccacgtttaaaaggagctaaactatttattttattttcctaataattgagaatcatgtctcattttttattttgtaactccccttttttaaaaatcttacttatatttgctgatatgctttcttttgatatgagagtgcctataaagtacattacgttaagttatataggttatacatatttaaaatacacaccctaaatttaacaaataacccagttatttttctgaaaaatgatacaattctctagtgaggaggattgtatatgagtacctatgttaaaaatgattttacaatttcaagtaacaaaaactatttagatgtagagctaatttataattaccttcatgatgaagcttactggtctaaaggaatacctttacgtttagtagaaaaatcaattcaacattcaatctgttttggcgtgtttgcgggagatcctaaaaaggaaaaatctaaacaagttggattcggaagaattattacagattcatcaactttcgcttaccttgctgatgtatttatacttaatgaatttagaggattaggtcttggcaaattacttgttcaaactatgattaattgtccaagtattagagaggtacgaaggattttgttagcaacaaaagatgctcatggattatataaacaatatgactttcaagctgttaaagataaaaacttgttcatggagattacagaaggatatctataataagttatcctaaggacctttcttaatattatgagcgacaaagcctgtagaataataattctacaggcttttatatatataaataccgataactgtgattatgttaactgatatacactatacaaaatatttaaacagatccagactcttgaactttaataataaggatattcatccttttgcatgacaacagaatcccatatccaatatatgattcctgcacctgttgcccatataaccattctgtcaggtcgaaatatgggtgtagatattcctccctcaattttataagaaacataaagaaaaataattgctacaacacaatatattattaaataaaaaacattaaacttttttggccttttgtttacaagcaactgtaagggtacggcaataattaaataagggatagatgcaacgaagggaataaaaagaaaagcaataagagctctataacttggctcaatgataaccataaatacagcataagaaatactagaataaataaccgtcttaaagctgtaatacaaaagatccatagatttcaacaataaagtacgccctcttttctatagtcaagtacgtacttttactataatgcacaagtgaataggaaacaattacctaaaaacaattcaggtaatacgttttatggtaattaaaagtatatatacatagtgatttaaatcaatactattgataaaatggaaaaataaaggtagtagtggaggtttaatatgtatatatggagtaatagnnnnnnnnnnnnnnnnnnnnnnnnnnnnnnnnnnnnnnnnnnnnnnnnnnnnnnnnnnnnnnnnnnnnnnnnnnnnnnnnnnnnnnnnnnnnnnnnnnnngtatatatggagtaatagtgagggagctataagccttttgtattcaagaccattatttatatttttcattgttgtattgtttgctttgttcatcacaattttaatgcaaaataagaagcaattagttactggtttgcatgtaatcactatagcaatcattagtttatttatttcaggcttaatccttttcttagaagggataattgtagatgatcttaatctatcaggagatacgatttcaacttatatgtttttaataatagtggccctatgtctcattaactcagtaacgtattcttttaaaaatagaaagctttgataaaggttaaaaagaggtctcttttagagagcttcttttttatttactacttagaatccgttttatgttaactagaaaagactacttaaacatatactttaacaccgctatatataagggtgttaagtatgggtatatctttttataatggccaaatatgcgttgaagggataatctgcggatcgtttatagaaataggcattacttttatagccctattcgtcatatatgtagcttacgaagcaatctataaaaaagaccgtccataattttagaaattgtggacggtctttgatttgcttattcgtcaatctttactaaatgtaaatcgctcttgatagtttcttacacaatatctcgattcaatttttcatctttaaccactttaattctttctacttttcctacaaggaagatatacgaaagtgctcctagaagagccaatgccgctatgaatactagcgctggggcaaagtttcctccttttgctaagaaaccaataacaattggaacaataatagaagctaaacctccgataaagttaaacactccacccgttaaaccgactaaatgtttaggcgctaaggttgagacaaagacccacgtaatagaggccaggccatttccaaaaaacgcaatagccataaacatgataatgagagatgtgctatttacataattggctccgataattgaagttgataaaagcagccctacgataatcggtgtttttcttgcaatccctagtgatactccttttttcactaacgcgtcagatacaaagcctgataataatacccctacaaacgctgctaaaaacggagcagatgctaggaagcctgattttaagaaatctaaccctctatatttcacaaggtatgttggaaaccaggtaaggaagaaccataaagtagagtttacggcaaactgacctaaatagatgccccatagcttccggtgagagaaagcttctttaagatttccccattcaaattttgctctttctcctttcttatccgcagatttaactaagcctccaccttcttcgatatgctgtagctctgctttatttactttactatgctgagaaggatcacgataaaaaatgtaccatataatgccccatgctataccgataatacctgtagtaataaacaggcctctccaccctaaaaagtgctgaatggtcaccaatgtaggtgttaaaaatgccagccctgcaaactgtcccgaagtataaaaagcaattgctgatgctctttcctgatttggaaaccagctggtgactactttattattagtcggaaaagccggtgcttcgaatgctcctgtcgctaaacgcagaccaaaaagactcacaaatcccttagtaaatccttgcagcagcgtaacaatagaccaggtaattagactaacggtatacgtaacacgagcaccaaaacggtcagccattacccctcctggtatttgtaaagcggcataagcccatccaaaggctgaaaatataaggcccagttctactgatgatagctttaaatccttggacatggctgtggcggctacagaaatattacttcgatccatatagttgatgacaacgcttacgaaaataaatgctaaaacacgaaatctaacgcgagtcggcttttcgctataccccttcattcccttatccccctgtatatgactagtttaaaaagaagatctgactgaccgttatttatcaatcagacctttccagctaaaatggtttccccattaccattctgctacagaaccatctttatgacgccatactggattacgccaattatgaccgatatcagccatttttctaacatggtcttcattaatttcaatacctaagccaggtccgtcaggaatctttacgaatccttcttcatatttaaatacgtggttatcaacaatataatctagtaaatcactgccttggttatagtgaatgcctaagctttgctcttgaataaatgcgttgtggcacgttgcatctacttgaagacaagcggctaatgcaataggtcctaacgggcaatgaggcgcagctgctacatcaaaggcttcagccattgaaataattttcttacattctgtaattcctcctgcatgtgataaatcaggctgaataatatcaacgtagccgtctgttaagagctttttaaactcccattttgaaaacattctttctcccgtcgcaataggaatggatacatggttggcaatttctcttaatgcctcattgttttcgggcaacaccggctcctcgataaacattggacgatagacctctagttctttagctaaaatttttgccattggcttatgtactcgtccgtgaaaatcaatacctattcctacataaggccccactgcttctctgacagcagcgatacgttctactacttgatcaattttttcatatgaatccacgtattgaagctcttctgttccattcatttttactgctgtaaatccttgtgagacaacttctctggctgcttcgcctacatctgaaggccggtctcctccaatccacgaatacactttaatggattctcttgcttttccgcctaatagttgatgtacaggagcatcgtaatattttccttttatgtcccacaaagcttggtcaatcccggatatggcactcattaaaataggtccacctcgatagaaaccacctcggtacataacgttccaatgatcttcaatatttaacggatctttgccaataagatactccattagctcgtctactgcagctttaacggtagaggctcttccttcaataactggttctccccacccaacaattccttcgtccgtttctatttttaaaaataaccagcgtggcggcacttgaaacaattcataattagtaattttcatgtaattttccccctttcgttataccattcactgcggctacgtatgctttagccttttgtgttagctcctgcaggtatgcatgagtaatttcacgatttgtatctactaaagaacttccaatcccaaaccctacagcacctgcttcttcgaattcttgaatattgtctaagctcactcctcctgttggaagaagtggaatatgaggaagcggccctcgaatatctttaatatagctagcccccagcctagcaggaaatactttgataatatctcccccattttcaaatgccgttaggatttcagtaggtgaaaaagcaccagggatactaaccgcaccgtatctttttgttagtttaatcgtttccgtgttaacagttggagaaaggataaattttgcacctgctaaaatagctgaccgtgctgtttcagggtcaagcactgtacccgctcctactagcacttgatcaccaagctctgtagaaacctctttaatggctgaaagtgcgtccggcgaattgagagtaatctctatattttttacaccgccgtcattcagcgcagaggcaattttcactacatcctgcggtttggctcctctaataatcgcaacgattttatgctctaataaatgtgataaactatccgtcatgggtaaacccctttcttttatcgtataacgtcttctcttgtaatcgcattcataaattcgtaaagctctttcttatcaggcaagccttcaatatcaccctctacggttacgaccatagctcctatagcacaccctcttctaactgtttctatcaaagaagaattatctattagtcccgatagtatcccagcagcgaacccatcgccagctcctactggatctatcactctagcaactttaaagccttctacgtaagcggattcattttcagttgaataataagctccctcctcgcctagcttaataacgactagctctgcacctaattgatgaagcgctgatgcaatgtcttcagggttatctttctcaaataaaaactgaccttcattcactcctggtaaaataacatctgcatatgtagccattttaatgagtgtttgacgcgcagtttcttcatcccaaagcgtcttgcgtaaattcggatcaaacactatttttacaccattttttttagctgctttcatcgcttgaaatacagcttcgtggcaggaatcgcttagtgcaggtgtaatccctgtcacgtataagtatttggcagaagagatgtactcttcattcatatcatgtggattcataaagcttgctgctgaaccttgtctgtaataaaacactttactgttcatttcatttgttttttgctttaaaaaaagacctgtaggagcatgatcatcaaatatcacatgttttacatctattccttctccttttatacttgaaagaattcgctctcctaactcatcttttcctaatcggctaacccaccccgtttgataaccgagttttgacagggcaattaacgtattgctttctgcccctgcaattttcgaagaaaaatctttagcgtatcgcatctttccattcgagtgtggggtaaacagaatcattgtttcccccatgcttatcacgtccattttacccctcttttcatttatctcttcgcctcttcatatccagcaataaaagatatgttagttgctgtttgaagcagcctttctacaataaactccttatgcttcagcattctttccttaggaccagctacactaatagcagcttgaatgcttccctttgctccaaatacaggtgcagcaaggcaaaacaacccttcctcattttcttcatcatcaattgcatagcccatttggataaaagagtctagattgtcattaagaacttttttatctgtaattgtataatccgtaataggtagcagctccgtatgttcaagcagctgttctcgctgatctttaggaagaaaagctaaaaaggtttttcctaatccagtacaatagagcggctttcggttaccaggctgagctgttgttctaatagagcgattattatcaatcttaacaacatagaccaactccccatccgacagcaaggccataaacacagtttcttgaacatcctccatcagcttctttaaatacggttttccttctgaagaaatatccaacgattccatagccgctgctccaatttgaattagctttggccctagcttgtacttctttaatgagtcctgatttaaatacccttcattatgaagtgttcccacaagattaaacgtactgctttgcggaagcgaaagtaaatcgctaacttcttttactgttaatccctcgggatgttgagcaatcaattcaaatacccttaatacacgttctgctgattttaccgacataaagaaatcctctctaaatcacatatgtgattttaaattttatatatgatttactgatttaaatattatcatagacagatcattaattcaaaatatttttataaatccaacaaaaatatttatgacagaaaatgaaaaactagatttattgatctaaaagccgttttaattgctgaaacaggtattatattaacctaacttattttttcacttcttccaaagcagctttaataatattaattatgacctggaatgggttaacatgaagaattttctatgtcgttaaagaaacattggacgaattattttggatagacaaggagtgattttgaatgaaaaagatagttgatcagaagttcacctttttaaatttgcagcatattaaaattgcatatattattcaaacacttggagttttacttattcttggtcatgatttcttaaaaggtggattagaaaagatgaaggcaaattcactatgggttttgttcattctatctagcgttgtatacggctatttatctctaagtattagcgtagaacaggaaaaagaaataaaaagaccttttcgctcttttttgctgagtttattcgtcctgttagtaatcggttcaattactgcctatttaacatctgtgacttcaggatttaattggagtaatggagtattatttggaggcattatttttgtatgcggtcttatagccatgaactatgcgtaccatttaagaaaaaacaacaaaatgaatgggaagatgatgaataaaagaagaccttgttcaagatcttctttatttctacggataattcacattacgataactagaagtaaccctattttatgctatcaatacttcacattaaaattcagatgattccatataccttgggtagcttgctcagtttataaaattcaccctaatttgcgtttgaatcctttactagctaaaaagtaagcgatgaccatgatacctaggcaccaggcgagggcactccagatatcgttgccaactgatccttcatacaagagtgcacgaattgtattcacgattgaagtcacgggctggttctcagcgaatgcacgaacagctttaggcatcgtttcagtgggaacaaaggcggaactaataaaaggcaggaagattagcgggtacgagtagcctgtggctccttccatagattttgctgtcaatcctggaataatggccaaccatgtcagggctagcgtaaacagcccgagtatcccggctaccgcaaaccaatctaggatatcagcgctggagcggaaacccatcaagagcgcgatgaggataactactacgatagtaagcgcattggaaacaaaagatgtcaacacatgagcccataataccgaagaacgtttgataggcatagtaatgaaacgggccatcagtccacttttcacatcattaaatagccgcacggaagtgtaagcgacgccggatgcgatagccatcagcaggattcccggcaataaataattgacgtaattggctgttcctgtatttatagcgccaccaaacacgtagacaaacagtagcatcatcataattggcgtaattgccaccgtaatgatcgtatccgggctgcgcataatatttcgcatcaaacgtcctagtaatacacctgtattgtttttcatttatatttcctcctttttgccgatgattgcgaggaagatttcctccaatgttggctgtttctcgatgtattccacttttgctggcgggaacatctctttaagttcggtaagggtaccggttttgatgatttttccgccatgtaggatggctatccgatctgccagttgttcagcttcctccaggtactgagtcgtgagcaagatggtcgtaccatcgccagcaagctctttgatggtgttccagacttcaatcctggcttccggatcaagtccggtcgtcggttcgtcgagaaaaataaccgctggcctgccaatcagactcatagctatatcaagtcggcgcttcattccaccggaatattgatccgcccggcgattggctgcatcggtcaagctgaatcttgcaagcagattgtcagctacttcattaggattagatacccctcgcaatttggcgatcatgatcaggttttccttcccagtaagcatgccgtctaacgctgcgaactgccccgttaggctgatgttctggcggacgtcagccggttgacgttggacgtcaaattcgcaaatacttacttcgccgctatcagccttcatcagtgttgaaagaatgttaactgtcgtcgtcttgcctgctccatttgaacccagcagtgcaaaaatttcaccgcgctgcacctcaatattcaccccttttaaaacttctttgtctttaaaagacttttttaactcttttacaaaaatcgctgtatttctcatacgtttttcctccttttaaaaagctccacaagtctgctcgctagaactgtcatgatgtaactaagctgagcgtctcgtagagctagtttttttatactctactattaagtctgacttatattctgtattacttagtaccgagtttaaaaaatgaccgaatagcgaaagtaactagctattcagtcgatgttattgattaaatttattttttcctaatcgttccttaatactctgattcaaatcttcacgatacttaaccatataagttttagcatttgccactaattcgtcagcaaaggaagccacatcgtctcccgtaatttcgagcacctgtctaccttctgcagcacctgcttcgaataaatcaattaattcatactgcatgtgtagcatatccattccgttgcccgatgagaaattccacatgtagttttgaatttttttaaatacaaactgatagtcctctggcaaggcttcaacccgtgccatcatcattttatactcttttttatcaccaatcatttttttgaatatttccagcatgtcatttttcctcctttttataaaacttcataagatgctttaaaactatccgacggtctatcttatgaagttagtttgacttcaagacgttgatttttgatgatacaaaatcccaccttttccaaaacagctcaagctccttgtagcctgcctcattaagcgaataaaatttgcggggtgggcccatatctgatggttttttttctatattcacaagttttttcttttctaatcgtacgagaatagtgtagaccgtcccttccacgacctcgataaatccaagctcgttcagacggcgtgtaatctcatagccataggtttcatgccggctgataatttctaacacacagccttccagcgaacccttcagcatttcagttaaattttcgatcttcagaacctcctctatatcgtctgacttatattctgtatcacttagtaccaagccaattttcacttaataacttttaaaaattaagctattaagtaatacttagtatatgtagattgtaatacttagtaccgggcatttcaactattttttaaaatattttcaaaattatttatgctttttattttgggaaaagcttattaaataagataagcataattacaaagtatggaatccataatacgtatacttgagaaatttaatttcaaaaaccaattcataacgtccctccctaaatgaaaaaagtcctctatcaagataatagagaactttttaaaacagttagcctaaaatgtagaataagcatagtaataaaatatcaacaggcaaactaatacttagaaaaagcaaaatatattttttaggttctggacctctcttcttaattgagaagaattctactcctaaattgttgattgtaattagtaaagcaaacattacataaagcaaaacgttttctttaaacatatgcgtaaatagtggagagaataaaatcaaaaaagtaaacatttgaaaagatcctcttgagaacaagtctattttaccgcctaaaaaatctttgaaagtgttatcaggactcatgttatatcaccaccttattatgataaacaaccagcagcagcactagcacctaaccatacagcaccaactccggtgccaatagcccatcctgcaggtccacttaccccagcaacagtcattaggccactgaaagcagcagtatgagcaaatccagcaatcgaagctgctccacagccactaattccttgaattgaaactgtaccagaagacgttttacttgcgccaagttctttaaaaatttgttcttttagttctttaccttctgggctatcaataatttcgttgaattgttctactgtagctgttagttgattgtatgaaggagaatcaaggttatcttttactctctctttattttcaatgattacttgattcttatcttcgtcgaattttacatactttagaatattattaagttgttcaactgaaccttctaactggttataagcatcagaatcattaagatcattttttaattcctcttcattaacaatggttatttgattatcttctttactgaactctaaatgttctaatatagtattaagttcttgttgttctgctgtagaaagttcctgactttctgctgcatttacgcttaccggcgttcccacagcagtagacgtaagtaatacaccagctgttaaagtcgtacatatggaaagtttaattttctttgcaaattgcatatctataaaatcccccaaccctaaaaaatactttatatgtattatcctaccagatattcaaaagcttgaattgtatttctagtaatttgaaaataacatactagaattattcaaaaaccaggaatttcattgtgattcttaaggctcaaataaattcatatatagagtctaaaatcaccgaattttaacatataaagtgtatcttctaggagaaacaataattctacgttattgctagttgccttcagataatttttttcaaactgaaatttttttatttggagatgaattaaaatgctgttaccgcgatatagcattttccgacgttttgtaattcatacagtaaataatgtcgtcaaatacgcactttttaaaatctgatacctagctttttttctcagcctcatttatttctctttcaataagagccactgaaagctcaaatgcttgtatccgtcttttagctaaagtaatttgagatttatatctaccagtattttctttagcttcaaacgtttttactgtctgtctgagtttatgtaaagttgaatcgatttgacgctttgcttcaactaattcagctacatcaaatttcatttaagtctctcctttttataattgttattggcagccttctcatatgaaaaaactggtgcctcatctctgtataaagcatatcatcaagatctattccttgctgctctatctcttattaaatgaccatacataagagtgaacaaatgctagagtttaaccctcccatttatctccatccgtaatccacttatcattttgcaaatcatagcatgtatcataatcatgaaaactaaaataggtagctaacgtactaccttttccgtctgccttatttcgacactctacaaaccattctacaatggcttttgtttcaccttcctatatttcctgtgcggaagttttatagaacgcccaaaatccaccttctttgtcaacaggtatactatacatttcaatctcgtcaaacaagtcgtagatacctgaaaaaatactgctattttccccttttcaatttatattgttattgtataaaatgaaattttcttttctcttacttaaatcttacgtttttcttaattttctttttataaaaattagaattttaccctttatattaaatagaataatagtcaagctcgaataaaacctgatcatctataataaaatttaaggaaaaacctttttgatcatacgatgtaagttttcattaggttaattctatgaaatgtaatagattattcagatggaaaaaggagtgaatacaaatgagtttagccacctatataggttcgaatgtagaattacctattaatgacgaactggatgatatagttactattggaagttgcttttcagatgaaatgcatcgattaaacataaagaaacatcattttactacttcttatgtttatgaagtgtcaagtgactggggaattgaaattacggaatatatgaataaaagcagactgaaagaatcaaaagagaaactacttgcactgtgtcaattgatggatcactatcttaaatcaggagatttttttgaattgtatagttgttggataggagaagaagctgaagagcgagaaggagaactaacgttaaacatcaattattttgatatagatgctattaaaatgcctgaaaaaacattagttagaatcgagaaataaacttcccttattatgctaacaattttgtcgcatctataatctgaacgcaaaaaaagctatttcaatcgtattggcatcggagtgaaatagctttttctactttacattcaagagtgtgttagatccttatggatatcttcacatgtgaattgtatcacaaacttttctgcatgtgaagataaaaagtgaaatttgtatgacaagtatcaaaaaaataaagagcaacctcgtttgtcaatgacgaggttgctctttataagggttcattcatacttatccgagtgcgaacgatagcagcattataacctctttttattgtatccttatctttagagtcttctagtcgtctaactcctactccaccgccatccataagtaaggatttttcactaaataccaattctcctgtatatgcataattatagtttcgaatatactcagaattaattacttcttttccgttgtaaatgctctagcatatataaccttcaattgttaaattaaaggtttatttctatatattgtgttatactaataatatagcactataaaaaaagaaaatatatgaaaattaataaatatatatgaacgtttgagtttgttttaattaaatgaattcagttaattaacatgctataaattagatttgatttaataatttggatacaaaaaacttaacagaattaaagcaataacagtgaaagcagcattgggaaatacgtgagtcaaggttgcatgagaatgtataacgcagatgttgaaacgccttttgacgaaaatcaaatggtacacattctaactacaaaaagagcctttcacaagcactgagaaggctccttttatttatacctatatctgtatgcttactgacgatggatatcgtctttttctacttaaactaacttgaatttagaaattagatatacctttatataagaacttagaagttttgaaaatagagttaatatttatttaataattatatagcaaatcccttcttatccgattatagttaattagcagtgatttttatcttagatatttactactatgttacaacggacgaaagaagggatttagtttggaacgggtttatatgaaaaagagaagtaaaaggttgatggctatatttgtagttgcatttgtagcttttattctttttccaacgagatttgcaagcgcagaatctgttattactttagcacctaacgaaacaatagaaattttaggagatggaattattacggttagtgatgtacatgactttgtacgttataagggtaatacggcagaagaatattatgctagctattatgcaacaagacataaggttatggacaacgatgaacgaatggttattcaaaacacaagtggggtagctgaaacggtaagtatttactctcaaccctataaaaaagtcgatcatcctgcattgaagaaagcaagtatgaaaacgggggaaagtttagagtatactggcggttcagattttgcaatacccgatagctatgaaagtgcttattatcgaaaagatggaacagcttatgcttataatccgtctcaatatcacaaccatgtttcaacatttgagtctgctgaaattagtagagctgtttttacaatgaaagatgatcaggtaatatatggaccttacgatacattcaaaatgccaaagagaagtgaaacaccggcgattaaaagggtgaatatgaaaaaaggcgacagttgggaatatagaggagattcagattttacgataccaggtcattatgaaagtgcttattataaagaagatggaacagcctatgcgtattatgactccagttttagtgatcgtttcaccaagtttttacctgggttttcagatgaagtaaaacgggctgtccttactatgtcagaagaccaagtaatatatggggcgtatgatacatttaaagttcctaaagtaagtacatatccagctttaaagaaggtaagtgttaaaaaaggcgataattgggagtataagggaggttcagagtttacaataccaagtcattatgaaagtgtatactacaaggaagatggaacggctttatcttataatgactcagattatagccatcgaattaataacctttcagatgctggagcaaaacgagcagtttttacaatggtggaggatcaagacgtatatggtccctatgaaacatttaaagttcctgaacaaagtaaatctccagctttaaaagaaatgaaccttaaaaaagggcaaactatagaatttaagggagatacagattttacagttccatacgagtttcaaaaggcatcttataaatccgatggaacagctaatttctatacagaagggggttacagtgagcgctttaataaattttcttcaaatgaagtaaaacgaacggttattacagtcaagagggaccaaaccatatacggtccttacgaaacatttaacattccggaaatagttgaaacaccagctcttaaagaaattgccgtaaaaaaaggtgagaatctagagtacaatactaattcagattttattattcctgaagggtttactattgccacctataaagaagatggattggctgatttttatagtaattggaattatggagaagaagtcataaaacttccttctaaggaggctaagagggccgttattactatgctttctgatcaagttatatacggaccttacgatgcttttgaagaacctaagcgtgtacaggatccagctattgcaacgattgtaatggaacctggagattttttatactttgaagatccaaaatctgcgtttactgttcccaatcagcacgaatatacatggtattcttcaaatggtaatgaagaaaaaggtataagtaattcacaagcaaactacgttgtggatggtggtaaaaagctctccataaaaaatactactgccgagagacaggaaatatacggaccatatgaattgcttcatgtagcgttactaaatgtgaacggaattactgacgaggataccgttatcactggaactacagtaaatggtgcaagtatatctataaaagttgggacaaatgttattgcaaaaggtactgctggaagtgatgggaattttaaaattaatatacctaaacaaaaagctaacactattctaacaacagaagtaaaaccttcaaatgggaataatagtttatctaaacaaataactgttaagttaacaccaaaagtacctaatcaaccaaaggtaaatgaagtaagcgataatagcacagtgataagtggaaccgcagaacaaaatacagtaatcgacgttaaaacaagcacctcaaaaatcgccagtggaaaaacagatgaaaaaggaatttttaatgtatcagttccaaagcaaaaagccggaacgcaattattgataacagctaagaatagcgtaggggaaagtccaatagcaactacagttgtcaaggataaaacggcacctaccccaccaaaggtaaatgcaataacagatcaagatacaattctcacagggacggctgaggctggggctactgtgtcggcaaatgtagggacaaaaggaattggaagttcagttgcagataaaactgggaaattttctatagagatctccaagcagaaagcagctacgaaaataggtgtgaccgcaaaagatgcagcaggtaacagtagtgaggcagtgtatacaacagttacagtaaagcctaaaacaccaattgcaccaaaagtaaatgctgttgcggataatagtacagtagtaactggtacagctgaagtaaacacttttgtatatattaaagtcggtacaacaattataggtaacggaaaaacagacgtaaaaggaaagttttctgtagctattccgaagcaaaaagccggaacaaaaatattagtaacagttaaaaatacaggagggtatagtccatatacaacagtagtcgtactagataagactcctccaaaccttccaaaagtaaacgatattacggatcagcagacagtagtaacgggaacagctgaactcaatagtaccgtttttataaaagccggaacaaaagtattagcaagtggaaaagtagataaaaatggaaagtttagtattaaaataataaaacaaaaagccggaacaaaagtattaataacagcaaaagacgtagcaggcaacgaaggtacagcaactgttaagactgttcaagataaaacagcgcctactccaccgaatgtaaacaaaataacgagtcaaacaacaatagtaaccggtacaaccgaagtaagtgcaaagataacaataaaggttggaaaaactattattggaaacggagtagcagacaaaacaggaaaattcaaaattactattcctaagcaaaagacaggaataaaactttctattacagcaaaagatgtagctaataatgaaagtctagtaagaagcataacagtagttaaataacgtgccagaaataagccaagacatgtagtagtactgtcttggctttaaattaaaagaggtcacagaattgctctctgtgacctcttttatttacgctttttgtttacgttgtttgacaaaatgaatattccagtaaattaaaatggcaataacgatatactgtgcaataggagaaatgactaaagctttagagatagggaactcatacacaatgacaactttcaccaacgcttctatcatcagtccgataccccaaacagctgccattattcgtataaagtgacgaaatgatccctcttcttcccatcgttttgtaatcacggatttatctgctgtaaacctcattgcaaagtaatagattagtggcttcggtgtcaatatagaaagtaagaagacaagtcccattatacctgtaacgtacgattcccttaacagaataaaacgttcatctcctccaatccatgcggccactatgctaagaacaattcctaaaaaaataaaagaagagaacgtatccaactttttatcctttatgagatgataaaatgtatctactaatggaacacatgctgccaaagataatgcaataatacttgttatatgcgtttttaaaatggtatagattaaatatggtaaaacaatattgatgataacacttacaattatccccactttgcttgttttcattctctacaccctcctttcattctttctacatgatggtttattgaaccttacacaactttcgcaagaggaacatgtaaaaatatattcgacacggtggaagaaattaacctctttattaaatgtatatatacttcaaaatttaaaaattcattattatgtattaactgatatctattcatctatttatatccccctcccatttgtttggtggggatattcaaggagttatataaagtctgtaaggacaattgattattactgtttttatcagattaatagataaagtattttacctataaatacattatctattacttatcttgtagaaaaacccacaatttgtcgtcatgtagagtaaataatataacttaactttttataagttagttataccatttacatatatgctataaaaactttcaatctgtaactttatataaatatgatataccaatttatcaataggtgaatagaagatagattggtatataacaagaaggaaaggtccatatttgtcgtcaggtagagtaaatagtaaaactaaaatttttataagttaatttattcatttactcctagttataaaataagtttatattttatttttaatagagattatattatttaagatatatgaatgttaaatgatttttaattttctatttggttattataaataaaacaatttcttaaaaggtaagtagaagatagattgatatattaacagcagtaaaattgactatttttcgcaacttcgattgaagttaaaactaatcaatttaacaagatgctttattatttacttaacgtaatgtaagttaacagcataaataaaaaagcactagttcaagactagtgcctttctatttattttaattataaattagttcatttttctttgatgactttactaagcaatcggtgtaccatttttaacaaactcactaggccttaataggactacatcgccctcttctggaactccacctatgactagtacctcggatttaaaacctgcaatacgcataggaggaaaattcaccacggcaactacttgagatccaatcagttgttctggtttatagcgttttgtaatctgagctgaagaacattttactccaagctccccaaagtctatctctaattttattgcaggcttccttgcttctggaaatggttcggcttttaccacagtaccaatacgaatatctaatttgaaaaaatcatcgattgttgccatcattatcacctacacttttattatttggagatacattgtataaacctttaatttatccctttgaccttattgattctaacatcaggaaaataggtatttttgtcctgtcttaagaatatattgtccaactataagatgtaagaaagttaaacatacttaacataaaacatgttccaggaacccatataaattacttaaacatattctagtcgtaaacctaccccaacttcttctatatcagcaactcgagagagggctatcttagaatataaatccgtacaatgagaagcgtgtagcttattaggatcaagttcttctatatactttacggtattctctagttgaaagtctgatggattcaataaatgaaatccccctataatatctactattctttcttcactacatacctcttttgcatactcaataatgttacatatccccgaatgggcacaacctaccataataactaacccttccgatgatttataaactaatgcagtatcatcaaaaataaaatcgtcaaattcttctttttcagtgttaacttttccaatagattctttgccctcaaaattaaactttcttttaatttcacccaaaaacactaatttatcagtcagccaaaatggttgcttagataagttaatagggaaatgtttgctcaatttattgtaagataagacactccctatctcgcttactgaatcaagtaatttgctttcaaaaactaacggatgaccaatgattgtaggggtatgatgagttaaagcctcacttttggcttccatatgcaggctaattaaatgtgtaagcccccaagtatgatccacatgtccatgtgataaggctacccaatctaagttccttaaatcaattctcatcttctctgcatttcttataaaagcatcggaatagccagtatcaaataaaattcgtttatcgtcttcctcaataaagaatgaaagtgctggctctcctaagaaatagcgatcaatcaacgtattattatctacaagtactgataatttcatataaatatccaccttttcttgatttccatatattataactaaattaagggaattattgttaaccaacaaaagggaatctgtattttatttgcataacatatacctatttagttaccataatgaattttctaggtaccaataacgtactagccagttcaaacataaccattaaaacaaagggctgatgaccacttattctggctttctccattagatttgcatgtcttttttcagtttatttaaatctttttttgttttcttgactaattttttgaatttttcattactctacctcttgtttttctcaagaaaacaacagttaaaagtagaagtgggatgattacttggaaaggaagatgaagaataaatggtactattgtctgcccttcatagaattgttcttgataattgctcgcgattgtcatggataaaaatagaataactaatcccaatggataagtcattcgggaaggggattggattttaaacaagctcgtcattccaattacaacagcataaaaaaacacgtttatcttaacaaagctagtaataatcaaagcaaacataaagaaaacataaagacgttcgagaaagtcagctacctgaatgctttgtacgatactgagaaggggaaactgtgaacgttcagtaagactaacgccaagtacactaatattaatgagcatgataatagtgtagccatactttgcttctgctttcacgtaccacgacctgtaattataactgtaatcttactgtttatatgtacaatcatcaaaatcgtacataaaacgttagataaaaaaatagaattacgcttaaaacgcgttaaacaggagcaaagaaagagtatttttaaggtaaataaaccttaaaatcctttctataggtttccaataattaacattaacttatctcgaaggctatctattctgttatagctggacttaaggtgatctaaatagtgttcttactattgtactttagtatcaggataaagaaatttggtctatactaagagatgacgttgttttccgacatgaactcgtcacctctttaagagcatctatttttataatagctgtttagaaatatcaacgtagcaaaaggcacttgcatatagcaagtgccttttataatgtaagtaacatgctaaaacgataattaacttaaatttggcgtttttttatcagttatataactttgtctaaaaagatatttacgtgttttttagctatttttttctatagaagtattaaaaagcttttagcttttaatttttcatcattattaatagtaaaggacgagaggtatctgatggccactttattatgccgtaaagcgagaaatagaaagaacccatacagccatggtatactaataacaaacatggagatgatggaggatattatgacgaaacgattagatttacgtgtcgactttgcgtttaaatcgttatttggcacacatggaaatgaatccattttagctgcttttttaaatgcggcgcttcgttttccagatgagaaaaaaattcagacggttcagttattagatcctcattttaataaagaaaaccaagaagataaacgctcgattttagatgtacacgcgcagttagaggatggaagtcgtgtcaacattgaaattcagcttaataataaacatgacatggaaaaacgaacgctctattactggtctaagatgtatagtagccaaatgaaagaaggcatggactatggagagctctgtaaaacgattactatcaacattgttaacttccgttatttatcgcatatcactaattatcattctacctttcagttatacgagcgagaacagaaagtactcttaaccgatatgctcgaaatccatttcatggagctacctaagttattgattaagtggcgtaacagagaggtagatccacgtgaagatcaacttgtgcgatggttattattacttgaagcatcagaagatgaagaaatcactcaggtattggaggagattgcgatgcaagaagatcaggtattgaaaaaggcaatggatgaatgggaacgtgtcagtcaagatcccgaagtattactagcatatgaagctcgaaaaaaagcattgttagatgaaaaatcagctttaaaaagagctgaaaaccttgggaaaatagaaggagagaaaattggagtagaaaaaaccattaaaactatggctctaggtatgattcataaaggaatagacaatgaaacgataagcgaccttacaggcttgtcacaagaggaaatcaataatcttcgacgtcagtgaaattaataataaaaagattacctattcaataataaggtaatctttttattattcctgatttcaaaaatttagttactatcattgagttttcgtttctggtacaaaactatttgatggagatgtatagaacctataatacagaaataaaatttcgttcttgagaaacgaaatttaaactggataatagataatcatacttaatcgagttaatgtttttcctcgattataataagagtgaggcctatcagctctaaagctaatagcattccctctctttattatatattcattgctatttatacttatagtgagctctccttcaaagacagttatgaactcttccgttccttctctatgcaaattagcctctacagatcctccttcttctatctctatagaataaacttcaaatcgtctatcgtcctcaaaaggaaaataaggataaacccgatattttccattgtcttcagataatatttgaatttcatcttttgaaatgacttttgtatctggctgcggatcatttattaatgaagtaaaggaaatttttaacccattggctattttccaaatggttgtaattgtagggcttgattctcctctttcaatttgtcctatcatagtcttacttaccccagttaattctgagactctttcgagacttaatttcttactttctctaaatcccttcaaatttttagcgataataagatttatttccttcataattacacccctataactatgtacaatataacgaccttattgtaaaataaaaagcacgacgttatattgtcctttttgaacattataatatacatattaaaggaggttcaaatatgccagtattatcattcttgctatatgtctttgtaaccagtttcacccctggtcctaataatattatggccatgttattcgctaacaaatatggcttgaaaaagacattaaagttttgtgtaggagtaggtgcaggtttccttatagtcatgttgttgtgtagctatcttaatcttttactcaaaaattttatcccaaaaattgaattttttatgactattctaggtgcaggttatatgatatacctagccataaaaattattcgtagtagaggtgataatgaaaataacaatgaagaccggaataacagtttttttatggggatgcttttacaatttataaatccaaaaggcattttatatggtataactgccatagcaaccttcatccttccatatcacaattcaaactttagcttactaatgtattcgctatttctagctcttattggctttatgagtacattctgttggagcttatttggttcattttttcaaaaattcctctcaaagtatagaaatcaatttaatatagttatggctttattgttaatgtatagtgcagtctcaattcttataaaataagtttctaatttatattaaaaataaagtttaagcatggaagaattttaacgttgtaaatatccattttgttaaagagtcatactcgcgttatacaaaataataatgtcctatcggtcgttataacgtatattttgcactctattatagtaaaagagaaggagttttccttttctttttttattcactcttattttcactctttttaaaacttaaaacatctgattaaccagaatcctcttgctcctttttacatttttctttagtcgttgggacatctcgctatttctttcctacttgtgttatacttttaaacatgtattacggttgtagaggagttttcaattgaaacagaaagagattttttcgtggattaaatccattattattgcctgtattctggcttttgtggtaagagagtacctatttacacctataatagtagacggtgaatcgatgatgccgactttaaaagacagtgaacatattattcttaatgaagtaggtaaaaataaagtaaataatataagaagatttgatattatcgtttttcatgctacaaaggaaaaagactatattaaaagagtaatcggtttacctggtgatcatatagaatatcgcaatgacacgctatatataaacggtaaaaaatatgaagagccttatctagaccaatataaaaaagaaataggaacaggcccattaactgaggattttaaacttgaagattatacaggcagcaaaaccgttccaaagggtcaattatttgtcatgggagataatagaatgtacagcttagatagcagatcacctaaagtaggaacaatctccgtagacaaaatcgtaggaaaagccaaattagcttattggcctttaaaagaatttcaatggattaagtaaaatctcttaaagctcccttatgaaagggagctttttctatttctttgccagtctgtcacatgaaatgaagcattgttgctttaagtcccacactaactgtagcccctgtttaaattcacttttccttatattttctgcgaaagtgagaaatagctgacgctcctacagcagcaatcaaaactgaaaaaatggtagatagcgtatcattggcaacaaacatcttcaccaaaaatgcagatagcaaaatagctacaaaacctattcctaaatatgaaagattaataattgataactccagctataacgttattcctatgtaaaaggttttacaattaaaaacataatgaacataataacggtaaataaagcccccagaagagcaaagttaagtggcctatgagtatcttcattagcctttacaaacagcttggaccatcttgtatacatcactaattttgtacaaagactaaacaaaacgcctgcaatgattgaagcaattgctatttttaagatatgaattcactcctttctaacacaacagaaggatatccataacctaacataaaaacctatataatacaaaagtctaagaatcataggaagtagtctttccactttctatgccgctactggttaaccgctctacatagtatctaacgattcaatgctttattggttggccattaaatctttcattagttgtaccggtttaatacaaaaataaaatagcgttcttgaagaacgctatttaaactggataatatatgatcatacttaatttagctaatgtttttccgcgattataataagaatgagctctatcagctttgaacctaatagcattcccactctttatcgtatattcattgctatttacacttatagtgagttcaccttcaaagacagttatgaactcttcagtcccttccctatgcgaatcagcgtctagagatccaccttcttctatttctacagaataaacttcaaagcgtctatcatcctcgaagggaaaataagggtagacttgatattttccgttgtcttcagataatatttgaatgtcggtttttgaaatgactttggtgtctggctgaggattatttattaatgaagtaaaagaaatttttaatccattagctattttccaaatagttgtaattgtaggactcgattctcctctttcaatttgccctatcattgtcttgcttaccccagttaattctgcaactttttcgagacttaatttcttactttctctaaaattttttaggtttttggcgataataagatttatttcctccataaatacactcctatcactatatacaatataacgaccataatgtaaaataaaaagcacgacgttatatcgtcctttttgaacattataatatacatattagaggaggtacaaatatgccattattatcatttttgctatatatttttgtgaccagttttacccctggtcctaacaatattatggccatgttatttgctaacaaatacggtttgagaaagactacaaaattttgtttaggagtaggtgcaggctttctcgtagtaatgttgttatgtagttattttaatgttttactccaaaattccatcccaaagattgagtttttcatgacggtcttaggagcaatctatatggtctatctagctataaaaattattttgagtaaagatgatgataaaaataacgatgaaaacaggaataacagttttttcatggggatgcttttacaatttataaatccaaaaggtattctgtatggtataacggctatagcaacctttattcttccatatcacaactcgaattttagtttaataatgtattctttatttctagcttttgtgggctttgtaagtactttctgttggagtttatttggttcggtttttcaaaaatttctctcaaagtataaaagccagtttaatatagttatggctttattattaatgtatagtgcagtctccattcttatcaaataacttgcttatttgattaaggatccattttaacaatggaatcattttaacgttagaaatattcgttttattaaagagtcagtacttctcttatgcgaaatattaacccctccttgaacgttataacgtacatattgtactttatatcaccattttacttaaaaatataaattgaccagttatgcataattcgagaaggatactcttatgtatctattgatttgcttacctttttaattttataaaatatgatcaatattaatttgttatgaaatttcaatagttatttaatatttagctacagcagcccatttctacacaaaaattaggttagaaaatttcagggtagatataagacgagatataaaatactaccatatttataaaaaagagtgtttttcatgcaagtcttccagtttcatgagtgatcgaaatgttgataatttaacaatgtataaggtcgtgtataaatgagagagtcaaaaagtgaacgaccccctgtgtattaagggatcgttcttttataaattagggaaagaatgatcatggtaactaactttgatggagtatacaatgtattgagacacaatattatattaactagtttaactctttttctttaatttcaacgattaagccaatgccatttaagcgcttctttttcgattcttttaacaaatgcatccttaccatcactatagccctcgatatcattgggaaatctatgagctaactcagcttttaatgctccatattcattgcttatcatttgattttgacgaagatagtctctaaaagataagtgtctttcaatctcttgaatattatcatactgaaaagcgtgaatttgatgggtgcgattatccccacctttacggtaataccttcttcttttgattccaaactcccccattacttcatatccgagcttctcaaattggtctgagtaattatctaaccttctaatgtcattaactaccaatagaatatcaataataggttttgcttttaagttttgaatagaagtacttccaatgtgaaaaatatttaccaattctttttgaagcatttccttaattgagtattcttcgtttagatattcgtacttccaatttggattatgttcaactactgtaatattcatttttctcccccttaatccttgatcacatggacaatatattaaaggattaaattgattgcaaaaatcttagtatcttctaaattataatatatgccttcttagaaaagtatttatgtaaactagctttctatatggtatacatcnnnnnnnnnnnnnnnnnnnnnnnnnnnnnnnnnnnnnnnnnnnnnnnnnnnnnnnnnnnnnnnnnnnnnnnnnnnnnnnnnnnnnnnnnnnnnnnnnnnntattaacgtcatgatcatacaaatcttcttgaatgtattccgtaataataaaatttgttaaatttgtattattaacaaaatctgaaaagaacgattttagaaaaagtgaatcttcttcacttaatttttcatcattgattaatgaaatcctaaacacatttaaaatcgcgttaatatcttcttcctccatataacataatggatctagttttttatcttcttctgtaaatggctttctcgtgtcttcaatgactacataagataaaatagttccctctctttctacgtgaaaaatttctaaatcacgcaattttaaaattctatgaagtgctatcataagttccccctgcttaaatattaatttaggatattttaatagattagatactgcgtcttgcatggaaatcaaccgcagtgtaacaagcgattcgctcatgcattccattcgttcgtctgtagattgtattgatttatttatgtctcattctcttttcattttaatacatataaagcgtaatcctcttcattcgaaaacccaagtttattggttagtgctttcgaggctttattgttcttatcgcaatcccaagcaggcataacgtttttttctaaacatttatttataaacgcctggcccactatctttcctaatccttgtcctctataggtagggttagtcacaatatcaatttcagctattgttccactatgaaaaatagacacacattcagcgataatcttttctttatggataagacaaactcctaatccgtttttcagaaaattactctctgatccccagtactccactatatatgattcattgaaattctcactttttcttaaagaatcagcgttaaagtcttttaactcatagagattggaaagactgtacgtagaatgaacttttgaaggaagaaacctatacttagaacgcgtcattttctttacatacgttttgaaagtttcgtcaaaaacagtttcccagtcagtggatggagtaaaaaccgtaaaccgtttctccttaccatacacgttctcaacaaaataacgatagagaaagttattaaataccacgtcatttccttgtccaaatacataatagtcacctgcacctattctaagaaatcctgatgatggcctcacaatatcatttacgtacacagctcctggaataacatgattaacaacagaaaaagcaaatgtaggagtcttaaatgacgcttctaatatgttgtttatcttgtaataatctttcggttccaaacaatgcattttatttcccccttaataaatatcagtgtcttcattatataagtgcatgcacaaatttagttatcataatgtgctttatcgatacaaaaacagcccgaggaataattaaaataaaggttaattactctttttcaagcgagctaactcaaaaagatttcatatataagtttgttataataaagattgttaaaagcaaggaggagtataagtgcacataagaaaacatgaaagacaggcattttatgccggatgtcaattcgtagatatggaagatgatggaaatgaacatggctttcctttacttatcatgtatcctacataccaagaagaacaagttgaaaagatgggaccttacacgataagcgctgcgcaagatgctccgctttcaaatggatcatttcctttagtaattatttctcatggagatggtagcacgcctcttgtttatcgaaccattgcccagtttttagcacgtaatggttttattgtaggggtacctcaacatccgtttaataatcgagagaataatacactatccggaacaatagataacctaaaaaatcggcctaatcatatacgtactataatcgattggtttttaaaagaaagttccttttcgccatccattaaatcaaataatatttctcttattgggcattccatgggaggatatacagctcttgctgtagcaggtggagttcccaattcttttccttctgaatctcctgatcaaaagccttattgtttatctgttgatcatgacaagcgggttcaatcactgattcttttagcgccagccaccggatggtttagggaaaaaggagcccttgaagacgtgaatatacctattttaatgattacaggcgaaaaggatacgattactccttcttttcacggggaatttgtattaaatggtgtttctgatccggaaaaagttcagcatatcgttgtagaaaatggagggcatttttcatttctcagcccatttcccgactttatgaaatctccttctttcctcccttctcaggatcctgaagactttaatcgcaaggagtttcatgaggacctgcaaaacactatattgaactttttattacattctttttaacagattagtcagttgtatcatcttttcttttgaagcaattatatctagaaagagaagttaaaatctcttagaaaccgatgagcttctaagggatttttatttcttataaggcccattatgctaatctccttctttctttttaaaaagaagtcagtatttacaaataaatatttttaaattcaaaaaacataacacgcgatcttgttaatctgtaataattaagaaatagagatatatagaaaaagtgctgcttattgaattgatatttttgctcttttacaaaacaaaagggggatttacaatatggctttaaaaaaaggtcagctaagcggacatgtatttttggctaaacttattacacagtacgcaatgattcatgaaaaaacggtaggccccgtagctgaagaatatattaaacaaattggtattcgtactggagagtggatggaagacttttatagcgataagcatgaaaagtggacggtagaggaatatgcagaagttataattgaccttaaaaattcaattggaggtcactttgaaattatttccgttcatccagatcatgtggttgtaagcgctacccaatgtccatttggtgacgtcgtacaggatgctcctcatttatgtaagatgacgtctagtgtgtttggaggaattgcagctcggaaatttggctatggaaaagtgagcttgcgccagcgtattgctcttggtcatccaatgtgtgaagttgctatatattttacaaaacacagtgaagaaaatggagatgtgtatgaagatcttcctattacgccttcttatggtaatcctttcaattgggaagaggaaacaattcatatgcttaatcaagaacttcgaagaagcgatgaaatgattgaagcccttcttgcggaattagaagaattacgtaaatagcattgtattaccacacttaactattaagacattttgttttagttagaaaagcaaaataagatgtataaaacaaagagcagcctttaattaaagggttgctctttgttttcaccactcattttagttattatggtaagcagaaaaaataaagtaaaagttattatagctatttagggattttatttgtaatcagatgcgtcaccctaaagaatccttggagcgatcagatgcctttgttaattgcatgaactgataaaaaagaagcgccctccggcaacttcttttcgcttttcttattcatacgtcagattttcacttacaaaataatcatttatacttagtctcttaaaaatgacagcagcgcttcgttaaattcgtgtgcatgcgttgcatttaagccgtgtggaccgccttttattaaagctaacttggaaccagaaatggcttcatacgttcgctttccgctatattcgaatggaacaatctcgtctgcatcaccgtgaataataagagtaggtattgtaaacttggctagatcgtctctgaaatccgttttgctgaaagcagctatacagtctagtgtccctttaggcgatgcggctgctgcaatatccctgttgtaaagtcgaaatggttcgctgactaagtcatttccgtcttctaccccaaaaaatgtttttgtaaaatcatcaagaaaagctaagcgatcattttttacgccgttttcaaattcttggattcctgcatcatctaatgctccttcaggatgatcttctgacttataaagaaatggtggtacagctcctgcaaatacagctttttctactctatctgttccgtaagttcctatataacgagctacttctccgccgcccattgaaaacccgactagcgtcacatttgttaaatccaaatgttctagcagctgatgtaaatcagcagcaaatgtttcataatcgtagccgtcccatggctgagaagactttccgaaccctcggcggtcatacgttataactctgtatccagcctcaacaagagctggaacttgatattcccaagatcgtccgcttagcggccagccgtgaattaagacaaccggctttcctgtcccgtgatcctcatagtatagttcaataggtgcttcattttctgttcctacattaatttttgccatttcgctacctccattatatagtcgttctttatttggttaagtggtcgtaaacctagcgtagataataaaaaagatggctaactctcctatgatgagggtgttcgggacgactaaaaataagttaataataaaaaatacagctaaaatccctaaaaacaagcctaaatgatacactttcaaacgatgttcttcgaatctatactggtgaaaaacaagagtggttgccatgaagtaaagcagcacggatccgaatacaaaatataagctgaatgtgtactgaacttcatgtaaaaacatcagcttaatcgatgctgcaatcatgcttagagacatgaggataagtaagtgtccgtaaataatcgtttgcccggctctttggatggacttgttcactttcttttctacgttctcaaagtactgccaccacatggcgatgatcaggacaaatgaaataatcgaaaataaaatggtgttccagtcccctttttgtggctgtatcacagcaagaatgctgacaaccgattctccaaacagaattaatgttagtaacgcaaagcgttctaacaaatgagccgtgttggtcggtaatttcgccagtcgcttatgtcctaaaataggtaaaatcatgtccacggcaattcctgtatataacacggcgtagcggacccatgaatcaaaaaagagcgacagaagcgagataaaaatcccaattccaaagcatgttcctaaaaacacagcaactttttttctctcactctgttcaaatttttggacaataagatattgaatcgaggttaacgctcttagcccgatatagccaaccaaaaaagagacgtaatattgatcaaaatctacggacaggcttgagatcatgataagaacaaacagcatttgaagaatcataaagatgcgctgatgcaaaaaatcttgtccaaatcgattgataaacatcgtttgtcccgtccacgcccaccatatcggaataaagatcagtacaaactttaacaaatactctccatgaatatacccttgttcaacgtgaagcaaaacatgcgtagcagtcgcaacggctgccacaaacaacaaatcataaaaaagctccagccacgtaacttttttttcttccactactccgcatcccttcctatcatctatcaggctgtcgttaatatactttattttatatacaagagacgcatatttcatgacaggtagcgtagtaaaagataggtgagccagctgttcatcagccggctcacctatctaacaattttctcttatgtcgttacgttttctccgtcacataaatgatccacagatgccattctactttcatgtcttatatgtaaagagaacgacctttagcaaaacttaatttctgctacgttagacactctgcttgctgaaatcgcgctgagctcctctatagctgcccattaagttttgataaccaggaagatgactagaaattaaattgccaaaaccttcaacgtcgttgcgccagtcacgctgcagctcgcacgctacgctaaaccagttcataagctgtgcgcctccgtgagccatacgcgttaatgctgcatctgcgacttgcttattgaacgttccggaagcatctgtcacaacaaacacttcgtagcctgctttaatggcagaaagtgcaggaaaagcaacgcagacatctgtcactacaccggcgataatcagctgttttttcccggtcgctttaatggctttaacaaactcttcgttgtcccacgcgttaatttgtccaggacgagctatttttggcgcattaggaaacaagtcaacgagttcttgcatgagcgggccgttgggtccattttcaaagctagttgttaaaataaccggtaaatcaaagaatttagccgtatcaccaagagccaatacgttgtttttaaattcatcaacaccatagtcacgtacaaggccggaaataagccccgtttggtggtcaactaaaagcacagcagcatcatcttttgaaaggcgagagtaaagatcagacattttataatcctccttaaattaaggcaagtaaggatacatgtacttcttccattccttacaagcggtctataatttgaacgtttttttggatttcatttatgatctgttaggtaaaacatgtatagaaagaaaagctatttctgaggtgaaagttcgtgaggtgtgttctctctcttaatctagaacaggaacaggcgcttgatcaatccaatgaatgaactgctgtaggtagcgctgaagatagcgttttgttgattcatcggttagtactttttgttgcgaatcaattttttcataaacttgcgaaatcagcattttttgaaatggtaaaacgttgacttgcatagcttccagtacttctctcgtttgcatttgagcaaaagccgtaccgaagcctcctggagtcgctccaatgagaccaactggttttctgtttaaaacagaagaagtccgaggtcttgatgcccagtctaaggcatttttcaacactcctggaattcctgaattgtactctggactaactataataacgccgtcaacatcttgaatcgcagctctaaaggatgcgacagattctggtgatccgtcagcttctaagtcttcattaaaaaaaggcaggctgcttatttcaatccagcgatattgagctgagtcatctaatgtagtcaatgactcagcaatcattcggttatacgaattctttcgtaagcttccacaaataagaccaatggtttttgtcatctattcacctcctcacttggaattaatttcatattaccacggtgtttcaaatatagatattagttttatatatagataaattaattccttctttgtacctaatgtaggattgaactagcgttttactattactaaaagaattctttcattaaaatttagtctaattctctcacttcaaaaggaatcaaagctctttcaatttgatctcgatgggtttcgtactgttcaggcagcatgagtttttctcccattgtttcaagtgactcatcatgagcaaaacctggagggtctgttgcaatttcaaataaaatttctccgtgttctttaaagtaaattgcattaaaataatttcgatctcgaacagccgttactccgtatccgctgtcggctacgtatttctgccattctaattgatcttcatcatcttttgctcgccatgcaatatggtgaactgttccaacgcccatttgcccgcgtccaatggttgttaattttaaatcgatgacatttccaatgtcagctgatgattgaaaacgtataaaatctccttcttgccctactttttgtagacccattacgttttctaataactgagctgtttcatgaggcttaacagataataacgtagcgcctccgaatcctttaatggcaacatcgggtttaatttcaccagcttgccacgtattgttttctccttcttctctttccacaatctctagatgcaaaccatgagggtcgtcaaactctaaatactgttctccgaatcgctccatctttgtagctggaaccccaaactttgctaatcgctgttcccaaaagtccatcgcaccttttggaaccacataggaagttaccccaacttgcccgtcgcctatttttccttgtcgtgcatttgcccacgggaagaatgtaataatcgttccaggttttccgccttcattcccaaagtaaaggtgatacgttcctggatcatcaaagtttaccgtttgtttgaccaaacgtaatcctagcacgcccgcatagaaatcaacattttcttgaggatgacctacaatcgccgtgatatgatgaatacccgctgtttttttattcattactaccatctccttcgatacatttttcgtcatatgtttcattatccctcttaaaattacaactatttatcgcaaatatctcgaattcgagatattaatcaaaaaataaaagcgtctttcttgtttcaacctattttctcttttagaaaataaacgtgtctaatgcataataccctggtcctgcaattgctacaccgattgctacaactaaaagcgtaagattatattcatagccattttgtgttgcccagtatccattcggaccgtgtactttcacaatagccatgaccattgttccggcaatcaaaagcgctcctagcggtgtaagaagtcctgcagcaaataaagctcctcctactagctcggataatccagccattaacgccattctaacacctggcttcattccgatagattcaaaccatcctcccgttccttttaagccgtgaccgccaaaccatccaaataatttctgagttccatgtgccataaaagataacccaatgactaaacgtattaacaataaaccaatactcaccattttttattcctcctattttttcatcaatttaaaatctcgaattaaaatatcttgaattaagtataattataaaatcatatggttctactgtcaacatgaattttattattttttatagaaacatttagcgacttattaaaaacatattcgttattatgtatggatatgaacatcaggatggaaaatataacagctgaactttattgatcctgttaaaagcaggatagtttttgagacgcaactatacttaatgattctgagccaaattaagaccctttttttgtttcaaaactagcctcaaaacctataaacagaatcatatacataaataaaagaagcaaacgccttatcactggagtttgctccttcttttctggtacatagagaatacccaactgttagatagtacttgttgtgtacaactaacgaaagtttttttctacttttaaatatttaagaccttttattaaatgagctcaaacacgcggagccatttgcaatttagttctctaaagctaattgtactttatactaaatcatagtttaactcttacctccgtaccgtcagtagctttgacatctactagtaccattcccttatgtttcctcagttccttaacaataggctttagcatgcttttatctattatcggaaaagtgaaattcagcccttttcttttaaaatgctcttttgtccatttaatcgcatgcttctggataaatttcgaaaaagcaacgctaatagcaatgtttaaaagagcatatggaactggaatgctaaatcgaacatcttttgttttcacttttacataaatcataagcaaaccattactcaatgatgactgaaacggtatctccgttcgccgatttaatatcaacaatttggccatctaactcgttttcaattgcttcaacaatcaggtttatgtctatatcttttacatatttttctgattgaggaatacttgctgcgatgctgtgtcccgccatcaataccagcttgacaagctttattggcaaattaaccttcacattatcattttcagttgaaacaactcgaatttttaacgttttatctagatacgcattcggtttcttcaaaagcttattgcctgtttcttctttttcttttaatacttgtatcagttctgatcccttttctgcatcaattttgccttcttgaaccattgttaacacttttgtaatttcctctttcatagacaatacccctattcttcttttaagagcttgatggcttcttctgctgtaatttcaccattttctaacatagacacaacttttttctcatctacttcatttttcttcttctctacatatccaagagatgtaatgatgtcattaagcttacctcgaacggttggatacgaaacgcccagttctttctcaacttctttgatatttcctctgcatgttaaaaatacttctacaaaatgcagctgatcactcgataaagatgccagcttagataattcaaactcattttcaatcgtcgtgtgacaatgggtgcactgcagctttgtaatttttaacgtttcactgcagacaggacaatttgtaagtactttataagccataatcaaatctccttcttttagttaacttgattatacaacaaatacttaattttaaaaataataaaattaaattattttaactaataaattaaataaatgaagttaaatgttaatattattaatattattcttcaacccacacacaaaatcaaataaaaaagagaaggattttacccttctcttaaactacataattgtttttcaactatcatttaatcaatctattcatcctgcaatttgagccctagtaaaagttccatttatatttccttctacaatgatgctatgtcctgcaaaaatatctccatcaaagaagtaaaaatcaaaattaccttaccttatatataaggcaggtaatttttgattaattatgaaataggtacatagaaataaaaaataagtagaactcattttcactgaggattagtaggttccgagtagaactcaataagatctcctcttgctaatgtttgataatattcaataggcctttctaaagaatcataagtggtgccttcaattgaaaggcacggagtttcatttccgattctaagtaatttactttcaaccgaatcagataaagatattcgcatatactgtttttgtttagccaattttaatccatagaattcatctaagacctggtacaaggatattttgtttgatatatactcttctatttgtaaacagaatttgtatggtatttgacttaattctatagcaaccggaatatcatcaataattcttaatctctttaaagaaaaaacttcttctccattagaaatatttaatttatttgctagaaactcatctgctttttcaatttttgcaaagattgtctcagtagtaggttttaatcctttgtcttccatccctttcgtgaaactatttacagttataaagttccattgaattttacggttagatataaatgtacctacgcctactcgatataaatgtacctacgcctactcttcgctctacaaacccctctctttccaatgtagaaagcgcgtgacgagctgtcattctactcactccgaatttatcagctaactccctttctgaaggaatcttatcgccgtacttaaggtttccatttttaatttcctctataaacattgttttcaacttttgataataaggaattccatcaatttctttttccattgtctaccccattctttatattttcaatttatacctgttattaatagataatatatatataagtaaaagtttacaaccttggtataaagctacaattactcaaattcgtcagataaggattctataatttcagttaacaccctttaaaataaaaacactataatatttccaagaatgataaccttttatatgattgttatccggtgtaagtataaaataaaataggagacggactcaaatgctaaaaggcccgccccctaataatttaaaggtactctaaaagatcataccaactttttggagagatttgtctttttgcttaatccatacccaaatgctccgtaactttcacagttttttgctgctgctattgctgattgattcagtgcttcatttacattgccatgctgatgataatgggtcaaaaacattgagataaaggaatcccctgctcctagagtgtctattacttttgcttcaacgataggttgtttgtaaacttgttcatctactaaaaataaggcgcccttttctcctcttgtaattccaataacttttgttcctaagctttttacgtaatgcattaactcaatacactctgtttcgtttaattcgcttcctgagaaaaagccataatcaacatatgggcaaacctttttaaggtatgcttcttcatgtcggaaagaaaagtcaaaagaaatagctattttatccgagagcataggtaaatcttgttctatatgactgtataagcttgtatgcataagatcatgagttgaaatatagttaaggtcagtttcatcgaaatttaattttattagggcttgtacgcctccattatttgatccaacaaaggtacgatcgttatcttcgttaagggagattacagattctccatttggtccatatgctttcctgattctagaaatatcaacatcttcagccactaaactatttacaatatgattagccgccagatcgtttccaatcactccaatataagagcttttctcaactccatatcttttacataaaacagctatgttcagagcgtttcctcctggataaatttcgtcacggtcttgataataatcaactacgttgtctcctattcctattaccttcatttcccttcacctctgtatctatatttcatttgataagtaagttatttaaataaaagtgaaggatctattatttaatttaaagttatattactttctttaaccctataatcaatttaaagatcctttttattttcaaatatactttcagtttcaaacagcattccttgataatgtacttaaaaactttctgatacgttcattaccattggtagtatgaaaaaacttttctggtggtgcatcttgaacaattactccctgatcaatgaatatgacacgatcacctacttcacgagcaaagcccatttcatgggtaactacagccattgtcattccttctagtgctaactctttcattactataagaacttcaccgactaattcaggatctaaggcagaagttggttcatcaaaaagcaacatctttggtttcatagccaatgctcttgcaatagcaattcgctgttgctgccccccagaaagagaatgaggatactgatcgcgtttatctgacaaaccgactttctttaacaaatattctgcttcctggattgcttgctctttttttattttccttacgtaaataggaccttcaataatattttcaagaacagttttgtgggcaaacaagtggaaaccttgaaataccattccaatttcagctcgaaatttgcttaattccttgtcatttcgtgaagtatgctttccatttatatctttatagagaattgactccccttctagcctgatatctccttcagtaggatactcaagggcattcatcattctcagaagagtacttttcccactaccacttggtccaacgataacgactacttcaccttttcgtactgataaatcaattcctttaatcacttttttttcattaaaagattttttaatattggctagttgtaacattatttttattacctcgcttttctaaataatctacaagaatggcaagtggataatgtagagcccaataaataattccgatcatcgtgaatatctgtatattttgatatgtggatgaagctaataaatttccttcatgcattaactctgtcactgtaataactgctgctaatgaagagtttttgattaatacaatagctgaatttccgatcgcaggaatgacatttttaattgcttgagggagaataatcctacgcattgaaagagagtaattcattccaatagcctttgctgcttccatttgtcctttaggaatggatttaatacctgctcggaatgtttcagctaagtaagcactctcattaatagaaagagcaacaatagctgcctgaaaagcacttaacgaaagacctaaatcaggaaaaacaaagtaaacatacatcatttgcactaagagaggtgttcctcttactatgctgatataaataccacatactttatttataaatttattcggcgttattttaccaagcgcaaccgctaaaccaataataagagagagaattaatgatattatagttaattcaattgtaataacggtaccttcaagaaaccttggtgcaaattctctcgcattcgataaaaaatcattcattgttggtcccctccctcttcattaattaaaatcccaatccacaccccattttttataaatatctttcagagtgccatcagctttcatttcttgaattgctttgttaaatttttttactagttcagagcgatctttggatacgcctattccaacttctcctgtaagagaaggaacatacccctcaacaattcgatacttcatattaggatttttagctttaaaataactaaaggtaggagcgtctgctaaagctgcatctatacggtttgtttgaatatcttttagtaaatcggatagtgtttggtaagttttcacttttatatttaaatctttattttctttttctagcatgtctttaaatgacgtccccatttgaaccccaataacttttccttttaagtccttcaatgattttgtcgttttgtcgcgttctggtacaataaggccttcaccaaaaccgaacacgggatctgtaaagttaatttgtttttttctttcatcagtaatatacatagcgtcagcaataacatctgccttacctgattgtaaagaaggaataagcgaattccattccccagttgatatttgaattttcacacccgatctctttgctacttcattaacaatatcaataataaaaccttcaattttattggtttttgggtttgtagcattaaatggatatcctccagctgtagttattactttaatttccttatcgttttttgaagcttctccactagttgatgtattttttccacaccccactacccccataagtaaaataagagtcacacatgctattagaatttttttcattacaaacttccccctatattaaagatgttcttccttgttaaccgcttacaacccctcttatagatattagacaataatgaaaattcctaaaattataaagataggattatcatatcacagaaaaaataaaatggtatataccaaatggaatttatttagactaccacttcaatttaaatttcccaaacgttttcttagttggtaatgataaaataaaggcctcggggtcgataccttttactgcatgagttacttccatccactctaattcgataatcaaacatagcaacaccgtttttttcttttccttgtatatatcgatatccttccacgaggtaacttctctatctaatttttttgccagtaaggaagagatttcttccccctcgtttgtaataatcatgacggcacttttctctgcaatgtttagaatggcatcatatgttttagttcctacaaaaaatgataggatggtatacatagccgactgaacatcgaaaataagcgctgaaatggctacaatagcggcgctaaaaattaagctgaattttcctatagaaatgtttgtatacttagcgataacacgagaaagtatatcaagcccccctactgatccgcctagcctaagaataatagcagctccacttcctgaaatgattgctccataaatacaacacaataatatatctttagtccatattaagcggacaggaatccattcaaaaaaaagagaggatactattactgaaaatacagtgtaaataataaactttttaccaatatgaatgtaccctaagaacagtaatggaatattgtaaacaaaatactgtatccccatttcccattcaaatagatgataaaaaattgcacaaattccacctaacccgccagctagtaaacttgaaggtgttagcaaacaattagttccaaaagcaaatagaaaacaacctactgtaattcctgctagttcataagtaatttgatacttacgagccacactaaaacatcctttcactctctctcatagagtatcctctgttaactcttcattaactctaacttctttattatccaggtctaatgaaaatggatgttaaagggaaattattttatgatcaatacttttccaaaaactttcttcatcagacacatgtattcatacgttaaaaatcttaaatttccagaaaagtattgacgtatgtagtaattaatagnnnnnnnnnnnnnnnnnnnnnnnnnnnnnnnnnnnnnnnnnnnnnnnnnnnnnnnnnnnnnnnnnnnnnnnnnnnnnnnnnnnnnnnnnnnnnnnnnnnngtattgacgtatgtagtaattaatagatttttattaataaagccagtagtttgagaaacttccttgaggagaacacttacttcctatattcccctcaagtttaactacttcttagtaagctacagtacggtaataccttcttttatctaaggaatgattgcgcttattttctagatgaacacttactcgttgaagtagacttcctaagactagtggagggaaatattgacgaaattctggactaatcccatcaagcgtataatcttgagtatcaaagatagtaagcttgtcagtatatttctcagcaaaacgctctactctctcagctaaaggtctcgtagcgtcttctcctttaagtaagataatactggtgtctctttcaaccagctcaattgttccatggaaaaattctgctgcatgtacagactttgtacgaatccattgcatctcttccagtacgcacatactatatgcataagttcttccccatgccgttcctgatccaattaacatatgataatcttcatctttatatttatctgcgaattctttagctttttcttctgtctgttcttttactgaaattaaattttcaggcattttctctaactctgatacaaattgttcgtattgcgcgaattctccattattgtgcattagtctaaagataatcatatacatttgaagatttattgaatctgcagcgtagtcgttttctgcgtagttagctattggataatctacgatatttgctaatggagtatccatttctcccactaacccaatagtagttgcccctctttccttacaatattgtgctgcttcaacagtctcttctgttgtaccggatagagaagagagaataacaactgaattttcatcaaattgtttatggctttgtagcataaactcagaagcaatttcagcataagcaggaatagatgaagtagaattccatatgtattcaaatggatacataatagcgatagaaccacctgatccaataaggaataaatttttaaattctttttttgaaacttcatccattttcttttctatttctgctcttaataacactgctccatttgttacttttaagtagttccgtggattaaactttaacatttagcaatctctcctcttaattttcaatttagctactcaatggtatataccattgagtataaaaaatataatggtatataccatttgtaatttagattataacacgcaaaattatagaaattataggattcaatataaatattaaaaaattctgataattaaaataatatcgggacaacccttgcatctattaagcccgcttcaaagttcaatttatgtcttagtaggactcctaggtattgatataggtgatcatattcgctttgttgccaagtatgcccttggaacagcgttagttatgaagattgtgtctatattatttggaatactatctatataaatgatttataaaaacataaaaaaggagagctgattcttcaaaacatttctctctttcattaatttgttttcaattgtttgaataataaaggttatgtctatatctgcaaaaatttaaaaggtgcttacataaggctacttaagttgttaaatcaactccatcttttcaccttttcaaataaatactgcactccatataacaaatatgctttgtaatgaagatagataaaaaattggaaatgacttaaccgtttcagacttacaattttcaaccttttaagaacatcaataaagtaaaaagcaaagattccatcaactataacattcagtaataaaaacttcttaaagtttccatacgaagatttaagcagccacattgaaagaggcatataaggtccaacgctaaaaggaagttcatcttttataaatgaactttttttatcataaaatttccaccacttcctctgatgtccatacaaatgattagtaatttcaaagataataataaaaatccctgctaacgaataacgttttatgctacgttttcctataaataacaacgacaaccatggaatcgctattatagacaggttaaatcctaagtgttttcttgatatcataagcgaactcacctcaatgtactttatctagttcttcttatagtgtccgcctattacaaaaaaaacacagaccatccaatggtctgtgttttttattaatgtgctttttgttcaacattgactctcttgataaagaacgagataaccaatccaacaattgcaacaataatcgcaaagacgaacgcatgctgaacaccgttggtaaaggcaagaacttgatttaatggatccattttatctgataccgtctcaaggaagcttcttgaacctgatgaaagaatggaaattccaacagctgttccaattgcgccagaaacctgctgcaaagtgttcataattgctgttccgtgcgggtacagctcagggggaagctggtttaatccgtttgtttgagccggcatcataatcatcgaaatggctatcataagcgcaatgtgcagagcaacgataaaccctgttgacgtttccagcgttacggttgagaaaccatacatggtgccggctacaatcacaagtccagggataactaaccatttgggaccaaagcggtcaaataatccccccataaccggtgaaagaattccgttaatcactcctccaggaagaagcattaggccagcggcaaaggttgataaagctaatgatgtttgtaagtacaaaggtaaaatcatcatcgcagacaatagtaccatcatgcagactagaattaataaaaggccaattgtaaacattggatacttaaaggctttaaggtctaacattggctcttccatcttcgtttgacgaatagaaaacgcaactaacgcgatagttccaatcacaagagttagaataacctgtagacttccccagcccccgccttctccagcactgctaaatccaaacacgattcctccaaaacctattgttgaaagaacaacggaaatcatatcgatttttggctttgttggtgtggtaacgttctgcataaaaaaagctccaaatactaaggcaacaaataacagtggaagtgaaatccagaaaatccagtgccacgttaatgtttttaagattaatcctgatacggttggtccaacagctggcgcaaacataataacaaggccgatgatccccattgactttccacgtttatgcggcgggataataacaagaatcgtgttaaacataagcggtaaaagtaaagcagttccaaccgcttgcacgacacgggcaatcatcagtaccccaaacgttggtgcaatagccgcaataaatgttccaatgatggagcaaattagagatgctataaaaagctgtctggtcataaatcgctgaagaataaaacctgaaataggtaccagaattcctaacgttaacaggtaccctgttgtcagccattgagcggttgtttcgtgaatgccaaatcctgaaattagctcctttaacgccatatttaaagctgtttcactaaataaaccgataaacccggcaataagaaacgacgtaataatcggcagcactttgatgttagagctttcggctgctgtttgttgattactcatattaaattgtcttcctctcttttacatactctttttggtgaacgtttttctatcttaatgataagttgattagcagacaaacaatgcatattgatataaagattagtgataagtttaaggcattatgttgactaagctttttctttctcttctcttttgaccgaagtgctttttgtcttctaaattcgtttctttccacagatacctctccatttcatttctaaatcaactttagaaaccttcctatgtaaactaatttccattcataatatggaatttttaataagtaagttaaaacgaaatagaactataaaatgaatttcattttacataacaggaatattgtaacacagctataagtactgtttctatctaaaatatactaaataacaacagctatatacccaacttggtaccatgtgacaattaaaacttggttctgttatatgctttttgttctgttcgccctaatagaacacagctaactttttaatcatcagtcaaaagaaagagtatcagaaatgaagtaatagtaaaaattgatactatggaggtgttttcttatgaaaaagtatgaagtaacgtttcatctaattaatggtgaaataagtcatttagttgaagctaaatcacttattcgtgcaaagaactacatacagtataggtttgaagacaaaagtaaaatattggatctaacaaatgatttggtcattgttaaaaggaacgtccaatactttacggtagttgaaaaagaataattagctatgtaaaaggacgttatcacaaaagtaatgtccttttatatggatgtaatatcttatagggtagtctctttttcccattctatcactaaaattttcctccaacttgaagccaaaatagatttggcgccctccaagcgtatctttaatttaagcctactaattttccttttttgataaaatttcgcattccatacttttctccttaaaaatattagatcaactaagaaaaaagctaaatacatgcatttaatatgcagagagaagctctctgaggaaattatctttgaaacaaacaactcgaattcacatactaaatatatctaaataaaaggctctattaaattttggtattgatattaagcgtaaaaacagaactccctattttatgaaagttctgttttgtttattcgcttactatgtatattttctgcgtcacaacgtaatttataaaaatccacatatctgtaaagagtacgtatagaaatgaaaagagcaaactctcttacacgtgagtttgctctttctgttctttattcaaatttcttcagtttaacttattgtcctatatccttcatccttttaagagcttttctatattcttgatctcttatacgcagcattttatcagcagaaggtttaggctgaccaaacttttttaaagctgctctatactcgctgtcaccaatgactcgattcgaaacagcctctttaggcgaacgctcaaaaacgggagtatcttttttaatgtgaacctcttcggtactctgcttttctttatcatgcggcttatgagccagcttgtggcctttacctgttaggaacatcaaaaacgaaagaatgaatactacaatgcttaatacacacgaaaacgtagaaaatgtatgataagtaatgatttcagattttacatgtagagactgagtgaaattttctttactagccacctggctctctccgcttaccgttgcaaagtgacctttatacacctttgcaaagacaatactgctgattacagggatgaccgcagatactgtaactcttataaattgaaccgtgaccatccgagggactaaacttgatagtggtccgcctaaagctgcacccataagacctgcagcaactgtgaaacccactcctgcaattaaagcggcaaagctactaacaaagagaaaagctgaagcatgaccgtctaaataaatccattgtatgttcactcccataataatgaccgctcctataatacctaatacgcccgatccaactttatcatataatacggcacttaatatggcggcaattactattccagcaaaaagcccgatatagatcagtgaagtgtctcctttatcaaaactagatctacttttaagcaatccttgtagagataaaagagttaaactcatactaacattgcctataacagcgatcagaatagcgagagctggttttcgagaagccactaatcgaaagggaattaaaggatttttaatatgccattctgcggcgaataaaaagcatagaaaaatgatgcttcccactatgcctatccatacataagtagatgtccaccctgatttttggagattaagtaatgtaaacgtaataaatgcagtaaccataaacattaatgctacaccgatgatgtcaaatggttcatgatgcttgtgctgttgcttggcatgatcatttgttaaaaatttgtagctgaagcatattcccagtaaggaaaggacggccgctatatagaataaccatctccagtgtccgtagctgttcactaacattccgagaaaaatgcccacaacgctagatccataaaatccgccgataagaatcagtaatgccaagttccgtttctgaatcggaaaagaaagaaccagcattggaatcatcatcataagtgctaaacctgttcctgttccttgtaaaaaacgaccaatgcccattcctaagaagctgttagaagcaatgcttacaatagctcctataaaaaacagacacatcgaaagaacatacgtccttctctcccctaacttatgtcgaagaataggtccaaacggaatacaaaatgcaaagctcataacccctattaaaaccggtgttatcgaaatataagattgattattaaacgtttgttggagaatttcacgtatagaatttaatgaagtgtttaacattaaaccaggaccaatagctaaaactgccagtaaggaaatcccccaatgtttttctattttcatactacaattcctttctgcctttcatgattgtaaaaaactaaaaatgcggcgttcatgtttcttcaaaccatcacggtagctatgataaagaagaaagatatttatccgcatttgaacaaactaaaaaataaagcttcagtaaggaagctttattttattttctaaacccgccactcgaattggccctaaaagtgttaggctggttaatttatcagccataaatgcagggctaaatttcatatcactttctaaccaagaacaaatgacacctatatgagctgatgtgatatagctaatcagaatatcttcagggatatcaagtccatcctctgcttctccaattgaagagatcagctctccatacactcttttctttacaatttccgtcatatgacttctaaattgaggcaaccctcgatcacttagcataactttaaaataatcggaatggtcatagatgaattcaaaaagctttaagaaagaaacggattcatcattttcttctactgctgcgggatcctcattattttgtttaggctttactttctctattagctcttctagaacttcattcatactctgcatgagaaagtcttgcttatcttggtaatgcaaataaaaggttccccgcgttaattccgctttttccgtaatttcttgaatcgtaatggatgtaacgtctttctctttaagaagttcgactaaagcgtctcttaagtatttatttgttctttttatcctaggatctacttttgtttttttagacatcgttcgtctccttgtataacttttattaaatatatgattgtaacttgcatagttgcagtcattgagaacttttctgatgattgactatttaaactatcctgtatcatcaatgtacattctatacacgatgtaaactaatgaacattatgtatattaagttttacaaagtataaccaatctgtcaatatcgaaaattggttaagaacaaatcttttgatcgttatatatggattgcgtgaacttgagagtgaaatcttttgtatgaaagaaaaagaactgaaggttgtaaccagtgatgtaagatctgcttagcttttatatagcaaattaataaaatacaaaccacatcttctttgttttcagtaattaattcttctcgagaaaggtctaccttctaaggtagacctttcttttttatatccatataaataacgcatacagaagtacaatataatatagaaacgaatctagattctatgaaatggtttaccttatcttaaagataagaaattcttcgtaatgagcattggttggcttcttgctgcaattccggagcatagtaactcaattttttaataaaataacaagtctcaggaaaatgatgtatcagaaaccttaacgtctccttatttaatagcttgttctccttgtacttttcagtcatagcataaacaaactggctcatctcaatagttgttttccccacttctaaagcaaattctgtttgtcttgcaaaacctggctgcttaaaccgcaaataaccttttaaatgatgattctgtacaatgaatgcctgaaatttcccgatatataaatctgcttgtttagatatcataatctcaatcggatcaagcaggtttttaaacaaaacagcatgtccaagctgatcttcgagccataaatccattaattcgactaagctaaggggaaccggctcctttccttttactagataagataaaaatcttaaatattcctgattttcacttaacgtaccattaagataggttggagataagtttagattcactgcgttttcaattcgaagagcctgaagagacccttcaaaatcaaaatatcctttggtaattggccaggcctttctcgagaattctattaatgcaggatcgttgtgcataacatcaggggataaatagttcagttgttttagcaagtcatcaaacaaatgaatatattgcttagctgttcggacgtattcgacttccttcaccgataagtgatctcgtacaaaataagcatggtcctgaattatttctaaccaaaataaatgttcctcccataatgaaatcattactagctctcccttcggtttccttactactacatgtttattagaagctttagaagaaatgaaccaaagtaataaaaaacaggatctcttatttcatcacataaacactcataaaaaagggaatatatatacatatccatatttttaaaaagggagaatatcagttgaagaaaaaagataaattgctaatcattttaatgacgattttaccttggcttagtattccgtttattggtaaaaaagcgctaaaaagattccttccagggagtctttttatgagtttgtatcttattgccgaaggcaggtttgcagagaagaaaaaatggtggtggtttccgtactcaatcaagccgaatgttctagcagaattaccattaatatttggcccctttttagttggagctttgtggatattaaaatatacttacggaaagttcaacttatatcttttagtaaatatacttattgattctttttttacttacttcggactaaaatggttaaaaaaaatagggtacgtctctttagcccggttgactagatttcaattatccattgtttttttaataaaaacgtttgtgctgtatgggtttcagattgtttatgaaaagtgttgccacctatcaaagaattcgtctttataaattttgcggagtatattaaagaagaacattaatgaaatagatactaattgctaagtggaattatgattttttagatactatgtagttgtagttacctcaggaagctaatgaatcctatgtcttaaggcttaaaaagagtgaaaataaggttaaataaaaaaaagaagtcaccttttggtaacttctttttttactatgcatatgtgattaaaacaaataacatataagtgttttatttttcactatcttcctcagcaggttttcgtttatgtttctcactaataatttttttgtgcagtatccttacctcatccaccatcagcagcctcatatcttttacaatatattttgctaattcttcatcagagatatcatcaccctcaatatcgagacgaaattcctgcccttgtattccaccgccattagtaaaatcgacttcaaagtcaaaaatgactcttttatccatgtctaatccaccttactttattttaattacctaatatatattcggtttatgaaaacaaattcccgatctaactatctaaggaagcatattgtctgataagtcctgataaaagaacttttaagttctagaatgttatttaaaaaggacaatgggttgaataagctccgctctattaactcatcttaacagtgtaactatatttgaagggagatttaaaaatgagtcagaaacgcgataaaggcaatagtcaaaaaggcaaatcaactagcaatacggtagatccagtaatcgcagcagaagacgtggaaaaagcaatttttccaactaacaagcctcctggcaatgcaaaaccttaaataaaaattagagctgtattattagctgcctatttggcagctttttcattaagaaaagaagttaattaataaatacgagtagtgaacaaagtattgatttttcaggttttatttgagtactgaagtaaggttgcacgtctactcatgagattaaaaaatgaactgtaggaagctatgtggcgacaattatctagtatctcctctttaaactattttatcttgacactgttctaaaggcgtgattagatataattgttaactttaaatataattaagttaacatatatttatttcggtggtgaaagtgtattgaattgggaagaagatattaagagagaacttgcctatttagatgagatttttcaaaaacggcaccttgttactacagaatttgctgaacaaccatggcttacagtcaatggccataggatgttaaaccttgcctctaataactatttaggctacgcaggagataaggggctgaagaaagcaatgagtgatgctgtgatgacatatggaataggagcaacggcttcacgcttaatagtaggaaatcactctctttatgagaaagcagaacgagcacttgttaattggaagaaagctgaggcaggacttattatcaatagtggttataatgcaaacctaggaatcatctcagccttggttccgcgtaatggcttcatcttcagcgataagttaaatcatgcaagtatcattgatggggccctgctgagccgtgcaaagctgcaacgctatcgccataacgatatgaaccacctagaaaatttattaaaaaaagttcccttagagtcacggaagttaattgtaacagatactgttttcagcatggatggtgacttcgccaagctcaaggagcttgttaaattgaaagagcagtataacgccctactaatggttgatgaggctcacgcaagcggtatatacgggaaaaatggtgaaggatatacgcattttcttgatctgcaagataaaattgatattcaaatgggaacgtttagtaaagcgctagggtcatttggagcttatgttactggaaaacagtggctcatagcttatttaaaaaataaaatgcgaggattcatttattcaactgctcttccccctgctatactcggtgcaataacggctgcgattaaaaaggtacaacaagacatagagcgtcgcacacttcttcaagaaaatgcattattttttagaagagcacttacatacgaaggatttaacacatgcaaaagtcagtctcaaatcattccaattttaacgggaggaaacaaaagaacaatgcagtttgcagagcgtttacagaaagaaggaattgctgctattgcagttaggccccctactgttcctgaaaacaaagcaagaattcgttttactgtaacagcagatcatactcgagaagatttagattgggccataaaaaaagtttctctaattggaaaagaaatgagtgtgattcaatgaaacaatccactattataatatttcctggatggggaatggaaaaagcagcgtttcacccaatcagaaaatcattgtctactatatgtaacgttttatgtacagactggagaggtgtaaaagaactaagtgactttagagagcgagcaatccaattgcttacttccactcaaggtactgtttatttaatgggttggtcattaggttcccttgtaacgcttgaacttgcaagtttataccctaacaagatagaaggactcatattgattggcggaactagtcgctttacaaatgacgtgcataatacatttggatgggagcaacgcatcgttgaacgtatgaaaaaacagctacagcgtaataaagaaaaaaccctcacttcattttataacgctatgttcactaaatctgaaaaagaagagaagtttcatcatcaatttattgaatttgctcagcgtaattataagggagacagtacgcactccctccttacagggctggattatttacttcaaaaagatgttagaatgcaactcgatcaaattcaaactccttgtttgttgatccatggaagagatgatcaaatatgtttacctgaatcttcttctttcatagctgaaagaattggtggaaaagctcagctgtgtatcctagaaaaagctggccatattcctttttttacaaagcctcagcactgtacgcaacttatagaaaaatttctcgaaaaggagctcatttatgattaataagcaacttttaaagaaaaggttcaataatcatgctaaaacttatgatgcttatgccgatgtacaaaaaaatatggcaaatcagttaatagatcaattttctaccaatttctttagacaggaaataacgattcttgaaattggctgcggtacgggttatttaacacaattattgtgcaaaaaatttcctaaggctgctattacagcagttgatttgtcatcaggaatgattgagttagcaaagaaaaaagtaacggaagatcgagtttcattcatatgcggagatatcgaggaactaagtatagaaaggcagtatgaccttattatttcgaatgcaacatttcagtggtttaatagtctccatacgacaatcaaaaaattgtataaacaacttaagcctgcaggcagcctgctattttcaacctttggtaatggtacatttcaagagcttcattcatgctacagtcatgcgaaacaaaagcttggtcttttcagtaacagttcacctggtcaatcgtttttttctcttgaagagttgtctcaaatttgtgaacaagcattagttccattgagagagcatccatttaaactatcaaaaatggagaaactagaggttcaatactttccgaccgttcaggcattttttacatcaataaaaaaaattggagcaagtaacagtaacgaggaaaactactgtcagcgtccttcattttttcgtcagttaatcaatttatatgaaaataatcatcgtgacgaaaatggcgtaaaagtaacctatcattgcttaatgtttaatattacaaaaacgaaccaatagccaatccagccctggttactctctagaagtgatgaatttccacccgtaaaaaagggtactcttctatttagaaaagtacccttaaataatcaattagatttaattaacttactgttttttagaaactaactcaataatatttgttataccttgctcattgtaccctgtttttaataactgtatttgattatgttcagataaatttgtaaaaatgattggtgtaacaagtgatttagcactttgtttaatgtagtttaggtctatttttaaaagcggggttccttgtttaaccttttctccctctttaattagacatgtaaatcctttcccatttaagttcactgtttctaaccctacgtgaattaataactctagaccttgatctgtttttagacctatggcatgttttgtaggaaagatgctaacaacctccccattgataggagaaacaagagtattattagttggttcgatggcaaaaccgtctcccatcatctttgaagaaaaaacggcatcaggaacttcttctagaggcacaatatatccgtcaaacggaaggttgaatgcgcttcctaaagttgtatcgttcatttcttttttctcacctgttgcagcaacttcagtttttgtcttcgcttcaggtacttctttgttattagagccttctgtaatagcctcttttggtatgccaaataaatatgtgcagatgaaccctccagcatatcctgcaagtaagccgatgatatatttcagccataaaccatgagcaattaatggaattaaagctaggccagatggaccgatagcaatggaaccaacatttccgaacattccaattacagctcctccaattcctccaccgatacaagcagtaatgaacgggcgtcctaatggaagaataactccataaataagtggttctccaatacctaatattccgacaggaagagcccctttaataatggtaacaagtgatttatttttacgacaacgaacccaaagtgctaaagttgcacctacttgtccagcaccagacattgcaagaatcggaagcaagatggtcataccggctgtgttaatcatttcaatatgaatagggattaatacttgatgcagacctagcatcaccaatggtaaaaatgctactcctagtacaaaacctgcaaaaacccctccacgttcaagtgtccaatctattccaccaattaaattactagaaatgagacctgcaaaaggcataataaagaaaatcgttaacaatccgacaatcagaagagcaattgttggcgttacaataatatcgattgcatcgggaataaacctacgtaagaatttttctaaaaatgagagtaaccatacagcaatcaaaaccccaataaccccgccttgcccagcagttagaggctgatcagtaaagatattcataataggaaattcttctgtaactcccgttaaaagggtgatacccccgataactccacctagggctggagtagctccaaactcttttgctgcgttaatacctacataaataactaaatagctgaagattgcatttttaattacattaagaatcgtcacgtattgttgccaagtatctttatcaagatctcccgcggttatgctattggctaaaatagaggcaataccagctattaaacctgcacctacgaatgctgggattaaaggtatgaaaatgcttccaacttttcgtaaaaaatttttgaatggcgtattgtttttcttttttagctcagacttcatatctgtaccttttgaagtcaaatcttcagatgaaggagctgcagaatcttcttgaagtacaataccaaattgttcagcaactttcgtaactactcctggtcctaggataatttgatacgtatcatcattgacaactcctaccactcctttcacttgttttatacttgcttcatcgattctattatgatccactggagtgacacggagtcttgtcatacagtgtgtataattcgctatattagaactgcctccaagagcttgaagcagttctttagctgtttgatgatgtttactcatagttgtttccatctcccttatagtttcgctacttaattcacgatcgcttgacggataaatccttgtgtttgttctaagcgatgtaaagattcctcatatgaaaggcctgtcaaaatcatgactatagcaagcttagaattacaatttgcttttgctaagtactcttctgccgtatcatacgtgcatgaagttgcttccatcacaattcgttttgcgcgttctacgagcttttcattcgtcagctgaacgtctaccattagatttccatacacttttccgatacctaccatggaagctgtcgaaagcatgttacaaaccaatttttgtgctgttccagcttttaaacgagtcgaacctgttaatacttcaggaccatttattacttcaattgcaatgtttgctacctttccaatatcagaacctttattgcaactaacagctactgtctgagcttcaattgagttcgcatattctaatgctccaatgacataaggtgtacgaccacttgctgcaatccccacaacgatgtccgccttagtaagtcgaatgttttgtaagtcttccatgcctaactctttactatcttctgctccttctactgctttaataaaggctttttctccgccggcaattaaacctattacttcatctggacttgtaccaaatgtaggcggacactcaacagcatcaagcaagccgatgcgtccactggttcctgcacctatataaataaggcgccccccttgtttcttagcttctataatagcttctacagcttttgcaatagaaggaagttctttttttatcgcactcgcaactttttcatcttcttcattcatggttgtaagaaaatcaaaaatggacatttcatccagattcattgttttttcattacgagtctcagtagttaaatgttcaagcatttcttatcatcctatctttgtttttgtttgaaatcgttctcaagtacagaataacgtgtttgaaatttaatttcaacaattattttaaaatgttaaaatttaatttcaaaaactatagtaatatgtgacttttaacaaacatcatatgactaaatcttagtaaataagacaactttcgctgtataaagatcaagcatttcttataccaatactgactccttgcctactgtaggaaggattcttttttacatacgttcctaaataggccattatggtaactaaagatgtatacgatacatcgcttaaaaacagaaaaaccactgacctcaatcagtggtttttctgtttattaaaaagtagtcaaataatgcttcatccatcttgagtagttatccaaaaatcatatgataagtaattttattattagtatatatgcattaatactggctatttaatcaaacctaattttgctgctacgctataacctgatgagttaaatttaaatcgattacgaagttcaataaggttcggtccaaagcttgactctaagatctctcgatgttttttcatcatttcatagatatacaagtcgtgaatgattacttctgtaattggcataactaatcctggatgcatcgtccaggcagcacggctgtccttaccaagtgatagtatacctgcaactacctctcgatcatcagcgcttagaacaatccatcgtcccccatattcattggttatttcttcgcttgcatcatgctgatgaacctgcgcaaaatcaaatactaaatctccataagacacaattaaaatttctacgcctcttttggctgctgcttgtaattcttcttttaattcctgggcatcttctgaccatatttccaatagaatacgccctgtagcttcttttatagcttcctttgtgcgatttaatataggctcataccctgtaatgttccaaatattttctctgtttaaagatacataagaataattttcgagagcttcctcagctacttccaacgaggattcagctttacgttttttcaagttgattaattcattaggaggtaacggtgtgtacagagcaggattttcatgactgaccatgatttctcctcgatctactagtcctcccaatacttcataaattttagatctgggcactccagaatttaatgaaatagcataccctgaaagaggagatttttctagtaaagctaaatatgcttttgcctcatattcagtaaaattaacatctttcaaaatttttattatatctagtgtcatgattggtcctccttgataataccgggatagagtcaataatttcaaactaagtataccattagtgcccttgacagttgggtttaaaaattataatttaattttagttgctacaaaagtagctacctaatagtttctaatactgcttggaggtgtactaatggatacaatgatagcgaaacaacaagaaagcttaaaaataagaaaggttagaagaggaaatggtttatacataagtgcttccgtaatagccgtccttttatggagtacatcgtttgtggggacaaaaatagcctatacctcttttccaccccttacattaggagcagctcgttttgttatagctgctgttattttaggacttattctcttaatcaggaaagataaaacaaagccttcattcaaggatataggattaatgtctataagcggtgtactaggcactaccctttatttttctctggagaacataggagttgaactaacaacagcatccaatgccgctattattgtagcgtcgtatcctgctataacggttttaatggaatttctcttttttagaaaaaagacatcatgggtaaaggccatagggattggagtagcgatgataggtgtatatcaaatatcctatagtcctgaaactcagacagatgataaacaattaattggtaatattatattaattgcggcaggttttatttttgctctctataatttcacaactcgtaaagttgtcaaaaaatattccatgattacgatctctttttatcaaactttggcgggagctattacctttattccattagcctttatagagaagtcaagttggcaaacaccagatataagatcatttctaaccttattgtacctaggcgttttctgctcggttatcgcttttttattatataattttggattacgcaaattatcttctagttctgcgatgacgttaatgaatcttgttcctattttcggtgtgttattttctgttctgcttcttaatgaagtggtaggcataaaccaatttattggtggaatcattgtccttttaggtgtagttttgagtatgagagaaccgagtaaaaagcatgttttagaaaacaagtaaaaaatatgcactatgtacacaaaagattcctgattaagcaccagaagcttttctttatatatataagttatcaatagcttgcacaaactaaaaaagacgctatgatagagtcaattacgactacaattcaatgaatgggagaagaccacctcttttgactggtaagaggtggtctttttctatttttaaactgtatataatatatagatttagttagggtactcacacttatacgaaataagccaacaaatacacttaacatgaataaagtatgaaaacttgatcaaactatggaataaatggagagatgttcattctcaatttctcattatgtagtataagcaacctataaaaagagcttcccttcggcagaccggggaagtttttctctttatatgatatatttcatacatttttagtcatcaccattcacgttactagaattcttattagcaagaatacaggacttttttatagtgaacgtagtttcttcataataaataataaaaattttgttgatctcaaacggtcgagaatcaacaagggactatattgaattaactgtaagatagtaaaggattatatcttttgtaaattagattagacttaactaaaaagtactcatcaactgattttggagtgaaaaataatggcttttattgaaacaaacactaatcactatttgtattatgaagagtatggacaaggcacccctgtcatctttattcatccccctggacttggctataaagtattccaatatcaacacgagttatccaaacatatgagagtcatctttccagatttaagtggtcatggaagaagctcaaaacctaaacagcctgtatcaatttctttttatgcaaacgagttagtacgttttatggattcgctgcatctagacaaggtgattatatgtggttactctgctggttgtctaattgctcaagagctagctattcattatcgccatcgaattgaattattaatactttcaggagcttatcctatagtaagagatgtacctggacggctattacataaaacaggaatgtatatggtaaaagaacatccgaatatactaacaacaagccttgctataagtcatactcgagacaaaacattaagaaagaatctagttagttacatgaggaaatcagaccaggaatcctggtatcagtattataatcattcattacactataactgtgtagacaagcttcatcgcttaacgatgcctttattgtttatatatggtggaaaaaaggattggactgctcactatatgaaagagtataaaaataagtgtaagcatgctgaattctttgttttacccaatcaaggtcaccaactgcctaccaaacagtggactcagtttaatgagttaattacaggatttgtcttaaatagatctcatttataaaacaaagcgaaaagccctttctttaagtgttttttaactattataaaatacataacaaacagaaaaaactactgagcttaatcagcggttcttctgtttgttgaaaggtagttatagtggtaatcgttcgtctagagtaatttgcttaaaagattataaattagaaagcctactgatacgaaatgaatcagtaggcttttcctttagcgtgttgtccacttgaagcaatgggattagagaatctctttctactttactcttataatcggaaatgaaaaatgaaatataactgttttttataaaatgtagtttggttttgataaaacatttaccttaaatgtgctagattttctcttatatattaatataaataagttttctttaatatgtattggaaagtgactatcttattaaaggaggaaaacaatgaatagtagctttactcaaaatgcaatttttgaacatacattttggatgcaaattttgaaagaccattcccaatttatcttagatgccttggctgaaaaagagcaagaagaaatccaggcggctaaaactttcatccaaacttttaatagtttgttagaagaagttaaagcagaccataacaacctagaaagcattacaatgaaagctaaagctcaaacaatagcactcaaagaatttaaactttccttattaagaaagcatttaacaactgacttcacgattcaccttacacctacttttctaaaccatatggtcaatgagctggatgagtatttattaattcttagttacttagaacaacaacaaattccacccatctttcatgagcttcaccatcatttgttatggatattagatgctgcgggacatgctggagctatttccgatagtcttgatgcagtagaaaagcaactaaaacaaaagagtatgcaattttctacccattttgaacatttttatctgaaggctgtagaattaactggttatttaagaacgaaccttgaatcctttccagcattaaagagaatgaacaaagacgtcaagttagaaatagagttatttcaagtatttcttcatgagatcgaagaattagaactatcgaacgaaatgcttagtacattttctgctttaatggctgatcatatgatgagggaagaatgctactatttaactaagttagcacaatcaaccaatactgcaaaaccaccttgtgaccctacgtcatctcattacaaataggtgccaattttaccctttatatttgtgaacgatttaaacggagaaatatatccgattttataagaaaagctatccctttgattattttacaaaaaggatagctttgaaatgcttgacgatggtttgagcatctgccacgtgcacttattaaaaagttagtatgtattattatcctgatttctggagtacttttactgattaacacacaaagaagtgaaagatataaaagaagaatataaaccattaagagagcgatgattaaaaagcacctaaaaagaatcctttgctgattataaactggctcccaattgttagacacagcctgacaattgggagccagtatttaatctttatcttttaatttaagctctctacttcagaattccaatttctatctacatggttaaaataggcttgttcaagaatttgcatataatcagcctcggtaattaaacggacgttacttgacgatgagttgttttccatggccaaccttacaatactcggaaagtcttctttctttacacccgctaaatcttttaatttaggaatgtttaataattctgttaagtctataattccttgaattaattttccaacagctacttcgtctgaatctgaatctttagcaaagctcatataccttgctaattttgcgtgcagctgcttattctccgtagaattaaatcgtaatacgtatggtaaaaatactgcgttagcaactccatgcggggtatcataaagtcctccaagcgcttctgctaggcagtgtactgaggcaacatctgcagatccaaaacaaaggccagctaagagacttccttccagcatatcttgacgagccgcttcatttttaccatcgcggaaaacgataggcaatgccgaaacaatggttctcattgcttgagccccaagcgcttgtgaaataggatttgtgactttacaggtatagccttcaatcgcatgaactaatgcatcaatgccagtcgcagccgtaacagaaggaggaagacttaatgttagttcagcatcaagaatcgccaagacaggccttaatgtactatgtttgagcgtcatctttcggtgtgtagctgcttccgtgataacggcagaacgagtaacctctgagcctgtacctgaagtagttggaatacaaataactggtgcaatgtttgaatacagaagtcgaccgtctgcatagtcagatggttccccgccgtttgggccgcacagtgcgatagcttttcctgtgtccattgcacttccgccaccaatggcaacaactgcatctgcaccaaattcacaaaataatttagcacctgccaaacaatttgtatctcgagggttctgttcaattgaatcaaataccgacactcgataaccagaagcctccaaggcagttacaattggtgaaactaatcccgcacgaactacaccagggtcactaacgactaaaattgatgaaccaatatttaaagatgttagcatgtctggtaattctttagctttgcccatccctacctcgatttgagtagaacaaaaatagttataggatttcatttctatctctccctttgtctaaaattaaatgcctatcttaagaagtactagctttttaatttcataatagcaaatgaattttaaaaataagcttacttattccattccgaagctagtatacccataaaatatgtatctacgtacttcccatccacataagcatgatttcttaatttcccttcggtgacaaaaccaattttttcatatagtgcaatggcctgtttgttgattcctcttgtagttaaatagattttatttagacgaagctgtttaaatcctaaatcaatcatttgctccatagccattcgaccgtacccgtgacctctagattctgaagataggagaattcctatactagctcttccatgtccgtagtctatatccttcagaaatacccatccaactaattcttgttcatcgctttcaattcctaaaattaaatcgctgttcaatcttttcttttctacttcttgtactacttcttcataagttaaaggtgttctgcctatcattcgtattgcccgttcatcatttaaccatttatgtaagtattgaatgtgagttgtttcaaatggggtaaggtgtattctttttgtactcattgatttatctactccttctaaaaagttaaccacaaactataattcattccatacttgattcaataaatatcgctagcgaaagcaaatatacatttctgattacaatatacttaacagtcaaattgaaataagtagatacataattgaatgaaaccattaatctgtttaaatagaacacttttgtatgtaattctggaatcaataaaaaaaccctctcttacattttacgtatacttaatctttgtctttaattagggttaatttatcggtttgagatattaaatcaattatcttatttcctttttcataataagtagaggccccttctcagttcctttccttccacccttttgatttaattactaatttatatcctgacgggatgccgttttcttcagaagctttagaccaatcatatatgtttacacgttcttttccttttactagctttgcatttttagggacaggaaaactgaaaaatttattagatgggatataggcaaagaatgtaacaaaataaaaaatcgctgctcccattagtagaattgctaaaacagtcgtcacggcttttttcaacttattgcctttctttcaatgacatttttacaatgagatggatcttattgcattaagattcctttagttttagatttaagcacctttttgtacattcgtcctatatagctttttccaacaggaataaagaatacattcgctaattataaagagaagaacgcttataaacgtagtcgctaaaaactcaaagatgttaagaatagacatagcgtgtccccaccaccaatatctaaaatccgttccgaacaaaacgaaatgaataaaaagagaaattgcctgaacttctcctactgatctataagaatttataataagtattttttaagtaaagaaactaattatgaaagatagaataatgaatacagaataaagagaaccagccaataaggcttcctgtggggaatgcatggtaacctcctttcatattgattattttaccattaattataattaaaggaagttaactttttaaggatttgcaccttaaaaaatatttaaatagaaaaagaatccttttgtagcatcgttgacacattttttctcaaaaaaaaaggattaattttcctccaatctaaagttcttacttctgacaacccccactacctcaatccgatgtaatatgaagaaggatttttactttttaagatagaatagtttcttaaagagtgataaaggagttgatttcatgtctaaacaaataaaagatagaaaagaaataaagcttttggattctcaaatttatttatgtgatgaaattagaaagttgttgaagaaaaaagaaaaaagaagtctagcctttgaacaagagtatacagaacatgatatattacacattgctttaaacaggttaatgagtgagttaatctctagacattaaaaacgtcacctatcatttttgatatttttcgagatagataagtttcatataaataatagacagaatatttcattaatatctttactttgtaaacgctttcgtttatactaagtataggttggatggcatgagtggctgtcatagtatttagcgtaggcggggctgatacgagggaacaggacatagaagaaatgtccttttttgtttgggcaacatttcttagaaactaggaaatgttataaaatactttcaaacgctttttttacttagtgtgccctatccagtctggaaattgaaaaagaccacctcttcccagttacaagaggtagtattttttaaaattgaattaacagtagtcgttagataatactttattgcatcttaagtaagttgcttaatttaagaaacagtatttatagacaacatattcaccgctttttctaagagtaaaatatcttcttcaaccattcttttcatatcatcgagatcaagttgaatatattcttcttttaaacgttctaattccctgacgaacagggatcccgtatagtacctataatttgtcactaagatttatcccctttgtatgctcttaatagatgtaattcccctttatttagattaacaaccgataaaagcaagatttataaaaaaaatccttccctggtgtaggcaaaggatttttaactttattggaataaggagaataggttattaatgtggttagattttcagtttcatatacatacaacgttttatcgttctactttgatgttaaatcaaatttatcttctttcccattccattttattgtcacatgaaaaggagcgttgctgctttgagtcgcgcatccgctgcagctcccatttaaattaatttccccttctgtctcgtcatccgtacctgacaatgtgcttgtttccccttctacaacataagaaacttttcctactttctccttgtcttttcctttatagatgatactgccttgcccgttttgagtattctctcctttatttaaaagatataaagctttccaatgatctccttcaccttcgaaacgcacactttcttccttgctaccacagctgctcaatactaataaaagaatagacatgaatcctaaaaacaacaaatttcttctcaattttgaatcctcctacacggtaaaaaagcagccatatatcctattgagtaaatttttattactatctggcctttttttaagtaatttaaagtgagttatttttcgatatgttctcctgttatcggaataaaaccatttttaaataaagcgtaccattcttccagttctttactctttaaaacatttaatttatttaaaatgtctttcgaaaattctaatgcaccgcttccattagctgtaattagacagccatcactaacagattgtttttctatataattttcatcccctcgataattaggtgctccttctttcaaataagctaatgaattacctgtatgtttattctgatcaagaaacccatagttccctaaaaaggtcgttgcatcacaaatcgctgcaaccggaatgttatgttcaaaacaaaagctcaccagtttctttacctgatgatttttcttttctctccatcccgttcccccaggtataattaacatcgcaaagtcaagtttaaaaggaaagtcttttaggctgtaatcgggaagaacggtcaatcctcctattgaagttttagggtgtttgtcgattgccattgtctgaacttgaaatcctgttccctgtttatttaactcagctgtcacataactggcttcccaatcagcaaaaccatctgtaataaagaccatcacttttttcatacacataccacccctaattcttgattagaaatataactaagcacatgatcaatcacctattttaatttacactatatatatagtgtaaaataaaaccaatattaaactattacgtttaaaaacatctatctataattgaacaatgtttccatctaaatcatggtttctcttcttctgttaaagggaattaaaccctaaaagtgaaccttaaaaggagaccaccatggttacaattgaatcaatcataataggtattgtttttatcctcattcaactatacgcattaacgatcgtcgaacgttctccaatcggggagaaaaagctgctctcattatcaggcggtgtagctattgcctatgtatttatttatatcttaccgacgcttcacaagaaacaagaagagtttggaggatcgctagcccttgatactgaattatattttcttggtcttctcggcttactcgtctatttttctgtgtattcatttgctcagacaaaagcagccacacacctaacggaactgaccgtgtacatggtacaggctagtttttttatggtttattcttttatcatttcttatgtcgtattttcaaccgatgttaaacgagttgaatcagtattctacggactggctatcagccttcattttatcgggtggtcttaccatcttggaaaaaaacatccgcgcttacacaaaactagaggtcgctatatgctggccggagcaacttttcttgggtccattctgggcgtcttcggaccttcatcaggactgcttattgaatctatgattgcttttagttcaggtgcaatgttattcaacgtgatcagtaaagagctcccttttgaaaagcatgcgcatttgcctacctttttaatctcatctcttatctacgcggctacaatgatttcgttaaaagctttttttaattggtagttgcgtgcgcgtgtttttacaaaataaaaagagcagccttaaaggctgctcttttaaaatatggtttttattactagatatactgcagcaatcgatgcaagaacgataagtacattcaaaatacgatgttgagtagctaagtggcctcgcttcatttctgcacgagtcaatggtttattttcatcgtgatttccactcactctgttacatctcctatcctgtttagttattgggtctgctaatttaagcaataagctgatctttgtcagctgcttcttccttttttatcttccctctacataagatatagaaaacactaaacataacaatcgaccaaataagattagctcctggctcagtgtcagctaccttaaacaaactcggtatagatccgaaaacagaatcgtccgttgtaaggaacagagcgagaaacatgttgttggctgcgtgtgcgccaatggtaatttctaagctttttgttttaatcgcgatatatgtaagagcaaaaccagctacaatataatctagtcccaccaatataatggatttattcatttcaggattagcaaaatgacctattgaaaacattagtccaacaataatcgcaagtaaaatgggacgcttcactttcttactcacccattgaagaagaagtcctctaaagaaaagctcctccgttgttgtttgaataggtactaacaaaaatgtaataagtattaatagtacatactctttcacacttacatggttccatgaataatccgaatggttaaacacaacatcaattaattgtgaaatgattagtaacaggctaaaagttccaaaagaccatattactttcttccaattcacacgtttgttagcagtgattaatgatttcatttttcgtttgtgaataaaacgaatgccgatccataaaccaaaaatccagcatatgtacataatatgagataacagaaaatcaaggttagcattgattcccacagccactccgctatcaaaatcaaaatatgattttccactttcatcagctgcaaccattattatttcagcgataatataaataattgatcctaacagcataaacacagaagcaaggattgttgtacttacataacgcttccagctattttttccttcttccacatttaaatagtttttcattttcttcttactccctcagccttctcttctcaattacaccgttcttctttactttgtggttgtctaggcaatgtaaaaatctattaggacccgaagtcctgcaatcattttaactaccgcctgctttttacctttaaagataaggaaagagactgacaatattaagaaattacaactctacccattacctgtttatataaaatttagcgtcttaaaagccgttaaaaaacagctttttctaaaagaagactcgacaccaagtcatcgttaacctttatatcttgctcatacgtgcccgcatacacataattttgaagaaaatacttgctactcaagaatatatatcctagaacaactaaaataaatatttttttcaacatcgtcctcacctttttatctaaagttttcccctcaaggctgctaccacaaccgctaagagcttatccataaacagcttttcatttttttaaattagctaccattctatctaacatcgaaaaaatgatataagttacaaatatattacattattattacaaatgtaacaattacattataacgaagaaaaagaggataatcaatatgaagtgtttagtaacacaaataaaattgctagattactataatgcatctaaataaattaaaacattatgcaaaagtgcacacgttttctggtagcaatatttaaatattaaataaaagtgtttttaactcttttcatcccattatggactgacatagtatagttttggattttaattgaatttttggttttatattctataatagtgaaggtgaactaagctggtgaaaaaggtggatttaatatagttgaataagttagtggtgcaaagtactaatgccacagcccagaagtttagaccgtaacaaaaaagcatagaaaacaactatgctacagcactttagaagaaggtggaaataaaatgatttttatacctatattatctttaataattggtttgtatctgttagcttcaggaatttttataattataagggataaaaatataaaaggaaaaactaaaaaagctttagtttttttagcagtagcatcggatatagcaactgatccagtgtcctcttcaggattccgaattatgcttggtgctgttttattaatagctggattcattttattataagaaatacaccttaataattcattgttagagtagtttattagaatagttcagttccataaatttcttcatttgcgatattattgactcattttaccatacagcgtgtaccttttcttctaaattatttgtttggagaaagatatttcaaatacagatcttaatagcaccttggatattttaaatttaaattaccaataataccgttacatgtcttttgcctaaaaggagctaagtaacgatggaactgaaaagaatagtaagcatcacctttttatcaagcgttatcttattttcgggacctttatcattggtcaatgcatctgtaaatgattctaaaatgactgtaaaacattcagggaaagaagagcagcctaatataaagattttggccactggaggtacgattgcaggctcttctgaaagcagcacagacacaactggatatgaatcaggagctcttaacattaaaacaattatcaaagctgttcctgagttaaaaaaaatagcgaatgtaagcggagaacaggtcgtaaatatcggaagtcaaaatatagataacagtattttgttaaagttagcgaagcgaattaatacactattagcttctaaggatgttgatggaattgtcgtgacacacggatctgatacgatggaggaaacggcttattttctaaatttagtagtaaagagtgacaaacctgtggttgtagttggttcaatgagaccagctaccgctataagtgcagatggaccgctaaacttgtataatgcagtgaaaattgcttctacaaaagacgcacgaaataccggcgttttagtagcgcttaacgatcgaattggtgcagctcgttatataacaaaaacacatacaacggcagtagatacgtttaaatcccctgaacaaggatatgtaggagaaatagctggagataaggtaatattttataacaaaccaactcgcaagcatacaacacaatcaatattcgatgtatcaaaattagatgagcttcctcaagtagatatcatatatgggtatcaaaacgattctaggggcttttatgacacagccgtaaaaactggagcaaaaggaatagtcgttgcaggagcaggaaatggactgctatccgatgctgctctaacaggtgctagagatgcggtaaaaaaagacgtagttatggttagatctagccgggtaggaagcggagttgtgacacatgaagaatcagatgataaagatacgtttgttacatccgattcgctaaacccacaaaaagcccgtattcttttaatgcttgctttaacgaaaacaaaggaccctaaaaagattcaagaatattttaatgagtattaatcaaaaatatctttcattctctattttgactaaattttttgagaacacttggtaactacagcttataagaaggtcataaagaggctgagacatcattaacatatttttgtctcaccctcttttaacagcaggtcccttattcatttccccagttcttgctttctataattaaatgatttgatgtgttgtctagtacacgccataccaaggtcttgccttctatatcttttaactccataatgccctctagcttattggtattcagatggacacgcccctcatctattctttgcgcactttttaatcttgttccaaatgttgcaggactttcttccgttagctttacaatgacatttatcatacgttcgtcagaaacatagtttttgctgttctcatagttcttagcagcaggcttaatagcgtgttctaacccagtttcgtattggcgccaatcaacaattaaaaaaaccgcaaatactaaagacactgtgagtaacaaaccgtaggcaacatatcgtttcatttatttttgctcctttcgcaggaataggttgtatcagaaaatagtatcgttttatttaaagaaatattccttttttatagaaaagataaaagaagatatatttttgtagaccttccatgctcaaattacaagaaccaagagagatttgtatacggctcatttttagctgccactattactttacttcaccataagctaaattaaaaaaggttccactccaatgttcaatgagtaaaaccttttttgcttatctcagtctagctgtgccattgcttttttataaaggagcttatgataacaaacagttactttattactgaaatactgccgttatgagtggctagtttaatgatattctttccttttccaataacagcgtccctatcatatttattcagaatattgacttttccattgtccacggaaacattaaattgaacgtcacttggttctttttccgtcgtaattttaatctttccattgtgggttttaaagtcaatatctcgatcaagttcttctgtttcaagagcgatgcttccgttatgcgtttcgccttctaaattaccttccacgttactcagcgttattttcccgttatttccttttgcttgaaccgtttttgctgcagcattttttatgcttgtaagtccattgcgtacgctggtgttcaagttttgtgaatcaatgttctctaattctacacgcccattgtttgcacgaatggaaacatctgctgcacgtacttttttaacagacacatacccattgttgctggaaatccccaacgaattatactgtttttcaggcagataaacgttgatggataggggttttaatacactaacaatgtcaaaattgatccagctgcgctgttgttcattataggagatgaaaagcgttgaatttttaacggcagtagtgaagtctctttttatattaggagatgtttctccttttaatgttactttgatattatcgcctttgatagggtacacatgaacacgagtattatccgtatcgatgtttaccttggatacttgattgctgttgatcgttttttcttttgaaataggttcagaatcaatagcacgatacgtaaggagacttcctataaccccaacaaggatgagaatgcctgcaagaatggagagtttctttttattcagcacgttttaaaccgcctttcacaagtgatacattgtattttagataacgtacaaagccttttatagctagcttcgtcacaactaacatacctagcataataaaatagccaattccgcaaaatgctaaagccatgaataaattaaagagaaaaaagccgctccaatgtacaatagcctcaccgagaactagaataggagatagcaagaaacatagacctatggcccaagctgacaaaatgaagccagctaatgccacggcgggcccaagaacaattactacattgaaaaaagctaaaccaattacggcccaagtggctcttaaaatattttgagttgttgccttagctgttgcttgctcaacgtgataatctgcgagcaattctttagctatttgattcggagaacctagcgacgctacaatttcttcttctgtttttccttcttctaagccaatggaaaaatgttcttcataatcttgtaaaatatctgcccgttcttttgtggataatggttttaaggattcatttaattgctgtaaaaatttactcttcgacattgttcacaccttctttaattaattgattaacacctcttgaaaactcgtgccattcatcgacaagtttgtataaataatctcttcctttatcggtaagctgataatatttccttgagggaccttctgtagattcttttaggtacgttgtgaagtattcttcttttgttaatcggcgcagaagaggatatactgacccttctgatatttcaatttgatcggagattttttgaactaattcatatccatagcggtcttttttatcaagcaacacaaggacacaaagctctaaaactccttttttaaattgtacgttcactgttcttcacccttttcacagtccactactgtttattgtatagtactgatttataatttcttcctaataattacaatatatcaccaactattgtttattgcaaggtactgtttaatattttttaaattttagccatttttacagtcgtaaggtgttttttataaagcaaggttcaaccttcttttctaattagcttgtagataaaattattttaacgtacccaaaagaaaaagcagcctatagctatagactacatagcagcgatcatgccaggctatttttcttttgcttgttggataaataaaaagaaaaccgttattaagataaaataatttagcggatttttgaaaatatccccgcctaatgccaattgcaataagatccataaagcgaatatcactagtatggctggtattataagcttgttcatacatcactcatccttcgtttaaaataataaagcaatcgtggctctccatacttgttgcatactctaacattaaatccataaatagctttaaaagcatactgattgaatgtttataagaatatcacttttaagataaaatttaacagccgttattgcatttgatagaaatgtcttacgtgtatttgatttttttgtaataaattaaagaaaaaagaagccatcattttacatttttatacaataaaaaacagccaattttatggctgttttaaagtagaatgctatcaaaaatttcattttctaggtgatgcaaattccttctgcagttcttttaaaaacgcattcgccgcagttgaaagaacatgatgctttttccacacaatatttaaacctgattcaagtcttggctgtaacggcctgaaacaaaggttgctagtagtagatgtattgactattttatcaagtgttatggcatatccaacgccttcttcaaccataatgcccgcattatatgcaagattgtatgtagtgacgatgtttaatttatgaaaatcttcgccaaaccaatccgcaaattcattttttgaaaacgtctgtttcatggcctgtcgtgaacaaatcagtggaacgtttactaaatccgcagcttgaatgctttctttgacggcaagagagctgtcttttttcataacgacgccccaaacatctttggcaggcatattaagataattgtattttgaaatatcggccggctgaattaaaataccgaaatcaagcagacccttgtctagccgttccgttatatcttcttcgtttccgctgtaaaggtgatatcgtatattgggataacgtacctgtacatcttttgctactcgtgcaatgtgtttcatagcttcagtttccccgccgcctatatagacatcaccacctattgtttcttccatcgaactaaattccgcctctaatttattcatcatattaacgatttcctctgccctgtttcgcagaagcattccttcatctgtcagaatgatactgtgactgctgcgaataaatagttttttacctaactcttgttcaagatcttttaattgtctcgacaaagttggctgtgtcacatgcaaaaaatcagcagctctcgtgatgtttccttctcttgcaaccgtaagaaaatagcgcaaaactcgaacttccatataccgcttctcctttcacaagctttagtatatacatcccagaaatgcttatcaagcatatcatgatataagatataagtattttctatatttaaaaggagccattagaataaatagcaacgaagttcatatcacgaaagcaccatttttaattattcaaaattgaaaggagcttaaaatgaaaaatttttatgtctgtcttctatcttagtaacaagcctttgcctctctgcttgcagcaacaataattcatctgcagcggacagagatcataatgcaagtaatccttcaagccaagcaccagaacaaccaaagaagattctatttcagctacaagaatcaaattaacgtttaacgataaagaagtcttgattaggatgtacgataactcaggaagtatggcttttttagctcaactgcctttaaccataacttttgaagattatataggtaaagaaaaaattagtattttacaaaagagattatcagcagatgatgtacaagctggagatccatcaaaaaaggcgactttgcttattacgctccttggggaaatgtagctattttttataaaggttttgagaatgccacaaatgaccttatcatactaggtcagattgaatcaggaaaagaaaacgttgaaaatattcatggtgattttacagttaccattgaaaaagtgactaagtaaaaacatgacaattggtctttaaacagcccgctttgaagcagctagaacagaacactttttagaaagaaggaaattgattgtatgtctaaacaacataagctacttatatttgtcttaaccttaggagctttcgggattataaataccgaaatgggggttatagggatactgccctacattgcggatcactttcatatcagtgtatcgaaggccgggtggctggtaagtctttttgctcttactgtatcaatatccggtccaactatgccgttattattttcaggaatcaatcgtaagaaagcaatgttgcttgtacttggtattttcgttttaggtaacattatctctatattcaccactaactttgctgttgccataattgcgcgtgtgattccagctatctttcatccaatttatttttcagcagcttttacaatggctgcgaactccgtcagcgaggaagacgctccaaaagctgtttccaaagtctttattggcgtatctgcaggtatggtacttggtgtaccaatcgcaagctttcttgcaagcacagtttcgtttcaactatcaatggcatttttcgctgttattaacgctatagtatttattgctacatgggcattcttcccttctatgcctgttaaagaaagactttcctacggagtgcagctcagcgtattaaaaaaccccgttacttggctttccattatggccgtccttttactgaattcagcagtatttggagtatacagctatcttgctgagtatcttaaaaccgttacgaacatctctggaaaactaattagctttatattaattctattcggtgtggccaatattattggaaacattatcgcagggaagctgcttacgaaaaatgccatcaaaacggtagtagtttttccttttgcattgggagtggtttacatcattttattcttcaccggacagttcacttggcctatggctattatgactttagtttggggaatattcgctgggataggaacgaatattaatcaatattggatttcatcagcagctccaaaagctcctgatttcgcaaacggactatttttatcatccgttaacttaggaacaacgattggtacagctgtaggtggactatttatatcagggctgggtacagaatacgtcgtactagtggggatcttgtcattagtattgagcgtagtatttattttaccaagaagctacatgaatcgtcctataaaacagctttctaaataaggcatcaattcaattctttttagggattcctgtgttttcttttattgcatctatgaagagcagaaatctattctaatcaatgcttacaccattaatagataaaaatggagatttgagatggaaaaatacactaaagttacgcttgttgccttaccatcatatacctgttacaaaagacgtttttttatgacttgctaagggaataaaaaaaaggaaattcaagaaaaagagggagttacaatgtcagaaatgggaagaaaagaagactacggggagattgaaataggtaaatacgaattgttctttaaaaagagttataaagttataaatacgattaatgacttcttgataggcatctggttcctaattggcagtattttattcttctatgattccttaaaaaatatagggatttggttatttattcttggaagcgtgcaattgctcattcgtccaacgattaaattagtacacgattttcacttacgaaaatatttaaaggaaggttatcgcaataaataatcttctttgtaaacaatttttcttgtgaattctatatatcaaaagagggtgtacgcgttagcgtacaccctcttttatcgactacttttttcttaaaaccaatgtcaaatgttctcttctttttccccataaaaaaatcccctccatagtagacagaataggttgctttcttttacttgtctactataaggggagcataccatgcaggacaggtagcttttgagggaattcataaactaatttataaaaagtctgaataattttataataaatcaagaaataaatcaatatatgttgaccttggacaaatatatgtaacgtacactttttatacatcttactcccacttaggtgtcgagtaaacgtagtcatatcagagatgtataaaaagctgcatatatgtaaactagctacttggtgtcttgaaataaaaaagccccattgatattactcaatttaaagaaggagctctgtccatcatatatagcccaaaaacagaaaaaacaactgaacggacccagttgttttttctgctacatttatttgattaaaggatagaaactttacagcttcttgagtagtttgttcataacatgtgaaattattcaatctactagacacaacaaaaaatagacagaatattttaattaattagtttactttgtaatcgctttcatttataataagggtaggttggatggcatgagtggctgtcatagtatttagcgtaggcggggctgatacgagggaacagggcataaaagaaatgtccttttttattttcatgaaaaaggtaaaaataacatttgataatttaagtcaggaaatataacagaatgatggtttttttattctaattatgtaaaatgaagttgtgtagaatctacataaaaaagaaaggattacctttggggataaggtagtcctttttttgttggttcgaaaattacacaaatatttatattttcaaaatattaagtgatgacattgatcatcatagatagtaagatataagtggtcagcctaacggtgggttcacgtttgataacccaaatcatgcttataggaaagagcatttctcatttgagaggaatgctcttttctctgtataagaaaaagcaggcttaagcctgcttttgtagccttagaggctattttatagttaagaagtacgtattagttcttgtgaggattcttgatacaaattcagaaactgttgaacagcttctgtcatacatgatgtattccacttctctaagatacttcttttttgattcttaatcgtgcactcttctttatggaaaatgtcttgtgttgctgaaatagaatgaccatcaaaagcaaagacttcttgttctgcttgagttatttgattcataaatactttctattccagggttttacattctttttctgcactctttagcccagcaacttcaccaactaaatcagacgctacactcaagatattgtcaatacccattaatagtttttcaatagtttttcgcttttatccatgacaaggcccttctactttttgagggcaacctatgttataataaaagtccgttacgtactaagttttgacatgggggtgctttcctagccggggaagtgccctttttcattttattttgtttggacttggattgtttataataatgtttaatcaagaatcttgtatataacaggatttttttgtttgatagtaaacccatttcattgaataagaaatagctgagaaatacactcgttggatttaatttatctaacgaatgctgtttcgttgttgctatactaggattcgatgagtttttaacgacttaaatattcatcatgaagaaggagagaattgaatggttacaacaaaaacccaaaaaaaggttgcagtaaaagatctagaaactgatacaacaactgttgaacagctagcgtattatcgaatattagccccactaaaagttagatcactcttatctcatcttagttcaagtgaaaagaaatctatttcctttgattttaaaaaaatgaaaaatggggatttagatcctttacgttacacatttatagaagaggtagacaaacagcaaacaggctctactgaaacatctgaaaacaaagaatctacgccttacaaagtagattttgttaacatgcaaaagaaagcttttaatttatatgaagggataattcacatatatggtatcccagacgacggtattaagttaccagtggaggaagttaaaatagatgagttgaaaattggaaaaaacgaagtcgtttatatgaacaatgaatccacccttgttacttaccaaatcattgaaacagagaagggattcaaggtcgttatagaagatactttaacgttggattttgacaggagaaagaaatctggtctattccatctagaaagagtaaaaagccttggttcctatatgaaatgtttacgattaataaactattacatacagcgcaataagtttccttttcaatctctacagttatctggtgggacattaaatttaaagggacatctccaacaaattgaggaagagattgaatcctacaaagaactgatagatatttgtactcaaattggaataagtgaaaattatatatttgatgataaggaagatttcccttccctattcaatgctataatcaatatctttaaaaataaacaatatagcttactaaatattcatcaagaaaaactagaaaaaacggagataatcaatattgaactttccaaatatgtgaaactagcattagtatatgcagatggatgtttccttaacctttatagtgaagaagcgttaaaaataacgggtagatattcgtctataacagatgtagctagtaatcacgggcaggatactgttgaacctgttatgttatctgataatcgggaaaattatgaccaaaaagtaagcattttcgcttctcgaaaaattgaagaaatggtgaaagatacaaactttgattttgacatagtaaaattatcttttgccgatgaacatcatgatatacaagctgacttaacaattactagttctttagagtatatagacttttatgataaaatcctcgatggaaattatttagagcttgctcttaatctaaaccaacgatacttagctaagtatccaaaagatgaaattgcaaaagttaatgtttatctcattaaactcaagcaagaccatgaattatcagaagatgaacaaaatgatctttataacatacaagtaagagcagaaatgaataatgagcaaacaatatgttttgcatgcgaagtattgttaaaaaataaggcagaagcaaggaaattatttgatactcttcacgatgaggacaaaaaagagctgatggaatttccaatttaccgtttttatcaagacttggagtagtatgctcattttcttctgtatatagattgctagtaaacttttataaagttttttatccttaatgcaataaataagccctatttgcctatgatagggcttataagttaaaaaagtcctctactttcgccttcgagtcaagtttttttaagatattcatcactttttttatggttgagccagatggaatataatctgagtcattataaattttactaactgtatgtctatttaaattagttgctttaactaatttggtttgagtatagcccttgcccattaggtattttcctaacttactttttttagtgattttaggcatactaacacactcctttttataaaggatggacgcattctaaaaaaactatacatttttgtataaaaaaacaggcaaaaatcttaatttacaacatataataaactataaaataaacagtatataaatattgcttatgcagagttggaataatgtcgatattttggtcataatcatatagcatgaatacagttaagaccgccttatagactgatacatattgggcggtctttgttaccggtattctttgaaattagacttcacacaaaaaacctttacctagagggaaaaggtttttttgtgtgaatattagataacgagataccaccattctagcaaatcatttttcaaaaaaggtttttaaccacttataaaaactcttcttttgttgttgtgctttttttaacactcgaatttcacgagccattgagattaattgacgttcgcgttcctcaaacttggcatcgatatagctttgtatctctttcatttgtacctcacgtgattctaagctaagggtttgcttttcagttgaaatgtttggtggagtgtctggtactaggttgaatttttttgcaacggttataacggctttttctaaggtcatctcgggatgagcataaattctttttagttcatgaaagatggtaacgtcgtcgttcgtataagctaatctaccgttttttttagtgaattgcacaccaattttggcaaaatggaagttgtattttcgtatagttgctatgggcaaaccaagtatatcagctaattcttcggtggtatatgctgcttctgcggttatgactctcaacatatgatcacctcctcttatcaagagaactattctaggtatatacgttaaaaccttcaattaataagagaacgagatattataccttgtaatgctattgttactatagtaatcggtattctcaattgagtggatattatcatgtttagctatttactaacatcatagattaaatatttgccctctcccctcagcgtgatggtttttcctgattcagccatgcatttagctatataaacataaactatctaaagagattaatctaataaatcattaaatagtgctatcttaattttaaagtgtaatatctattggatttgagtcaataatttagatataacaaagttgtcatggtgccaaatgagctaattgcggcattgataaatgttagagttttatttttagaggattaaatcttttgttaaataaaaatctattttttaattcctgttttatttagggaattacaaatctataaaaatggaaataaaacaatannnnnnnnnnnnnnnnnnnnnnnnnnnnnnnnnnnnnnnnnnnnnnnnnnnnnnnnnnnnnnnnnnnnnnnnnnnnnnnnnnnnnnnnnnnnnnnnnnnngtgtacgcgttagcgtacaccctcttttaaatcaaatatatcaccctaggtctaaccctttttcattcaatttatgagaagtcacagcaattacaaactttccatcatccaaatcttttttatgagaggttagctcctctgtgggaatacctaaatttgttgcacggtcttcttcatttgagtaattttggaccacaaaaaatttctttaatttatctaaaaaagaatccggctgggcccctccagtcatatcttcctgagtgaccttatcttggtcagcagcagatagcttatccacgtttacattcgttctataagctaggttgcccgctgcggtctcttgattagttagaactgtaatttcattatcctcataccctatcattcttaatttctcaattctagttaatgtttcttccggcgactcatatacacctataatacttttactcataaaaccttcctccttcattaagatcttttctcctcattttttatgtacccgctattctatccttcttaacaatggagccgtagttaaaggagtgaatcaaatgattttccctttttaaggaattcgattaaataaatgctagcttgcttaaggcaaaacgtttatctaaaaaagattacctcccctaatactgggtatatattcattaaaagataataaaagggagatgaaaaaagatgaaacatgtaaaggctcttattataaagtttgtaatgagcgctgtagtcttaggcatagtatttacaggcatttataattacaattttagtgacactatactaatcggtttagtcctcacagttgtcgcttatgcccttggcgatttgttagtatatcgcaatgctgctgatgattcagactataaaaaaagaaacattgtcgctacaatttctgatcttattttatcttttttagtcatctggataatgggggcatccttttttggaaataccataaccgttattcaggcttctgtagtatcagctattgttatagccgttagtgaatggttcttccataagtatctagataaacatgttcttaacaccgataacgataaacataccgatgcgacatataataaataacttattaacaagaagagcaaatatcaaaaatagacaaattagtaaaaagaaagactggaataaaagtattgtagtcaaaggaagatccgaacgatgaattgagattcttgatagagaatcaacttcgttcggatttttttatgggtatgttgaacgtagatttcatatatatatttgcttctagctgttgattgaagggcaaggcgaagactcctgcgggaaaagcggaacagatgagaccccgcaggagcgcaagcaacgaggaggctcaccggccgcccgcgaaaagcgaagccttgcacggaaattaacagcgctgtaataagtaattcataccaaagcattcatccgagttgttcgtctttagattgaagtgatttagttatgtctcaaccttcttttttaattctgagagatgtatttatggtagagaattcatatattatattaagaaaaagcccactccctttcagttgaaagagatgggctcttcttaacgttggatgtatatgtttacatcaactcgagaaaggaataagcttgaaaaaattcactaagagatcaattcgcttttgccttacttattggtcggatagtcttgtattctggtttccacatagctttttctattaacctttctacatcctgttcttgaaatttcgatacaccatctttaatagcagcttttgcaacagctatagccactgttttggatacgttttgaagatctttaatatgaggaagtaacgtatcacctttggtttgagtttcggccatatgggcgactgcatttgcagcttcagcgaacatcgtctctgtaaatttttcagcttttacagcaattgcgcccagaccaagaccgggaaatacaaatgcattattagcttggccaatttcatatgttgttcctctatactccactgaatcaaagggacttcctgttgcaattaatgctttgccatctgtccaatgtataatatctttcgggatagcttcagctaacttagtagggttagataaaggcataatcacaggtctttctacatggcgagccatttctctaatcatttcttccttaaatgcccctgttactcccgatgttccaattagaatagtaggctttacttgtttgattacttctaacaaaggtattttattgtcattatcttttttccaattttttatttcttctactttacgggcataaggctgctggaatgaagctaaatcatttatctcctccgttaacagccctctataatcataggcccaaaacctatcatatgcttcctcttctgaaagaccttcaagaaccatcgcactgtggattcgatcagcgtttccaataccggcagaacctggtccaaagacaacaatacgatgatcttttagggaggtctttgtaatttttaaagcagtcaatacagcccctaatgtaatcacacccgtcccttgaatatcatcattaaatgttaaaagatgatctccatactcttctataatacgtctggcatttttattccctaagtcctcccaatgtaacaatgcttttgggaacttatttattattttatttacaaattgatcaataaattgattgtaagcttcgcctgttacacgctcatggcgattacctaaataaagcggatctttaagtaattctttattattggttcctacgtctaacacaatgggaagaacacggctcggatcaataccggcagctgctgtatataccgctaacttacccactgcaatgttaattccgcctactccccagtctcctattccaagaatgctctcagagtctgtaactacgattaaatcaatatcttctgagcttaattctacattttctatcgctttgtccattttgtccgcttcgtcaatagacaaatatagaccatcaggacggtgatattgatggctatattcttgaatagcttctccaacggttggtgtgtaaataatcggtagcatttcacttaaatgatcttttaataatcgataaaacaataccacatttcgattatgcaaatcgtttaataaattatttttttgcaaatcatttgatgcattcttaaactgttgataagcacgctgtacttgttcttctaatgtcagtacggtgggcggtaataatccatctaacttgagttcttctctttctctttttgtaaatgcagatcctttgtttagataaggtctcgataaaatatttttcccttttaatggtgtttgaacgaaactcttttgtgcttcagcagaagatctcatatgttatcccctttctgttcttaaaagaatgtaaaaaaccaatgtttttcttatatcatagatctcattatgggtaaccaagatgttttcttgttacatacaatacctttaaacgaagatgctcttccctaaacatataattaaggcagcactctagtttgtattcagataggtcaagtggaaagaagctttatatgttatgctttttggacgttaacatagttacctaaagaaaaattagttttaccatagtcctcttcagcaaactaaagcttcagcggttaaaaacctttctctcgtatcataataatttcgaggtgaaagatatgtataaactgttatcacatacggatttagatggagttggatgcggagttttagcaaagttagcttttggagatagaataaaaattcgttataactctattgcatcgcttaaccgtgaagtagaatggtttttagaaaatgaagaaagaaatacacatttatttatcacggatttatcagtaaacgaagagaatgaaaaaagacttgaagagttttatcaaacaggaggaaaagtccagctgcttgatcatcataaaacagctcttcatttcaacgaatatgaatggggacacgttgtcgtagaagacaacgaagggagcttagcctcgggaacgtccttgttttatgaataccttatagaaaatgaacttatccagacttccaatgcggttgatgaatttgtagaactagtaaggcagtatgatacttgggaatgggaaaagaacaacaaccaagaagcacacaggctaaatgctctcttctttttaatatctattgacgagtttgaagaaaaaatggttaacagacttcaaaacagtgaccacttcttttttgacgagtttgaacagaagatattagatatggaagaagataaagtagaacgttatattcgtcgaaaaagacgagaattggtgcaaacctctatagatgactatttggcagggatcgtgtacgctgaatcgtatcattcagaacttggaaacgaattaggaaaagaatatcctcaccttgattacattgccatgttaaatatgggaggaaaacgaattagtcttcggaccattcatgatcatgtggatgtatcagaagttgctggtcactatggaggcggaggtcacgcaaaagctgctggatgttcgttaactaatgaagcttataaccagtttgtaacagatacatttcatctggatcctgtacgagaggatgcaagaagaaaccgatataatttgaaagaatcttcatctggttctctctacgaaactcaaaatgatgatatgttccttgtttctcttcagaatgaagatgaatggataattgaaaatagcaaagggctatcgattcatacatttaaaagctttaaggaagcagaaatctttttaaaaaggaattatgccgcctggttagtaagagatgatatctttgtaaagtatttaataaggtatataaaaaaactaaagcacggagaataagcaccgaaacatattttgattcatctaatgaatgaaagacccagaaaagctattaaacgaaaatgaagtagctttcctttcccccagctccgcttgaacgttcaggatcaggtttggataatattccatgcggagcatgttttcaagatccagaagtcgcagcggctatcttcatggagatagccgctggtatagttgcttatagctaattaattggctcgtctattcggaaagatattgcagtgatgtttggtcaaattcacagattgcaaacactgagctttctataaatgcccaaaaatgtttcttagaaaatagggacattatggtaactagttttatctatgatatacatattatctaattggtttaatcccatatcctaggtcgatcaacctccatgattctcaaatactgtaagagttgtccagcgtgtacggattcatgatagcctatccgcatcaacatatcccctaaagaacgaatataaccaacatctgaacggtctattttaatattagttaaatcttcttcagaaaaagtagtaatcatgtctaaaaattgttgatggtaggatgctgcaaactccaattcatcctttatagattgtaagggtcttttttcaaaaggagaatcaaattcctttaagctgcccaaattttcgatagctagatgataatagtattctgactccaagacatgacgaaccatttctatgcatgtcatagcttctttatccggcttccaatcgagtttatcatcaggaattgcttgccaaacctttatacttcttcttctaatctcttttatatttaatactatcgcatctgttccattcatttccatacctcctcttatcatcattttacatcatttccccaaaacaaagaggtgaattttcaactaaacttatttcaaatattcatggttcttatgctgagtataataactttcatccttaaacgcttaataacaagctgtataccattggttaaaacagcaggtattagtactaatcactatacatgtccctatttaacaaataaaaaaagctagcataaagctaacttttttaagttagagagaaaggcaggctaataattagcaaccgccaaatcctccccaacaagcacagccaataatgattaataagataaacagcacgataattaaagcaaaaccactgccaccgccgtaaccgcagccgccgccataaccatagccacaacctccgccataaccgccaaagaacataaacttcacctccttctcgttcatacatttagcatatgatgaaaaacgaaatttgctccacgaagtggatagactacgttttatatcactataaataaaaaaataataaccttttagtttcttttacatacaatgaagcatcctcagatcccatatatgagttttactccctctgcaatagattgtttgtattccgcccaatcagttctattgcgtataaaagttgccccgcacaacctagaataaaaaagtctttctcacattagagaaagacttttttattcttattaatagccaaatccgcggccgtaacagctgcatccaataatgacaagaagaataaacaggacaactaataaagcaaaaccagaaccagctccaccataactagacatacaaacacctcttttcgtggtatttaactaaaagaaaagactttaaatatacatgggttaaggtattatatgtagacatagctcatatcgattggattttggtcaaaaataggctactttgtttaacgattgctagataacattataaatttcacatagtaaaaacccttcattgttaaaatgaaggggcttttttggctatcagcaccaaggacgaggtctaggagggcagcttggagcacaaaaatgttgatgcgtttcctgacatacaacggattctgtatgcgggaatgagtgcatatatttataatttttttgataaacatttgtggtatgactaggatgcaccactggcacaaacacatcttgaccagtaaaagatgtattttgtttaactgggtcatactgagcaggcatagtttgagaaggtaattggccacatggtttagctggaggataaccgcagttaccttgctgaggatacatagccccttgataaccaccataattagagtgctgataaggatagttgtttctcatattaaaaatcttctcctttctgttagtagactcctcttactgtatgtgaaacaaccatagaatgtttggacaaatacctaaagaagaccctaattatttagggtcttttctactaagagaaaaagaaatgtgtatccttagtaacatagctatgagactaagaaataaaaggttttttaatgcccattattcctcaagattaacatccatcgctccgttatcaatattatttaaaatggttttgtttttatcgtctaattcattacgtaaaagtgaattacgcgtcgcttcgtataaatcgtagcttctttcatcaactggagaattatgatcttcacatatcattttttctgattctttagagtgatctgccatatcagtcacctcctctgtatagtatgtgagttgattagaaaaaacataagaactttatctggctaccgttgggtaaggtttaatcaacggttagctgtttctatatattgtgtttacatatgacctaatattaggtggacacaaccgtttcttgagcatgcttttgaatgatttctggaacttccagcaacgaattaacggttatcaatttaccttttggcgcaacatcaattttaacttggttgtagctccactccagttcagaaggtacgtgaatcgcatgtattccagcttctactgccggtcttatatcggtttttaatgaattgccaatcatccaagtcttttttggatcgtacttaatttggtttagtatttcttttaatgcagctgtatctttttgttcagaaataaatacccttttttcaaagtatttagctagctctagctgaacaatttttctaccttgattttcctcgtctccacctgtgtgtaagtagagatcatgtccttgttctttaagcttatctaatacttcatacatatttggcaaaggctctatcggtacttcaaatacactttgaccaatttttttgactctttggactctatcttcatggatatcttgatgattttgttcactaaaaaataaataagtagctactaatgattctggaaatcgggaagagtgaaggccatgcttttcgatactttttaaatctatctctaactgcttttgttttatttcttccttagtcagattctcaaaccattcctgcaattgagccacaaaagcatttatggtgtctctaaaatatttattacagtgaacaagcgtatcgtctaaattaaaaagtagggtttgcttctgcatttcgttaaatcctttctacaatggatgtacagacaatatatgaaaaaacactaaccatttttattacctatccacacctaacacgaaggtgaatttcccaatagttaggtacaagcaattgattactatactgaaatgaaaatatttagtggaaagacccttctagcgtataaaatagaaggatctttttataaggtaaaaagctgcaggatattcctgctaataaatataacgttcaaaatgctttctattcatgttcgttttgaacgtagaggtactcagtcctgaacgatttattagtggttggctgccttcgccttctttaggtatattcatttcaagaccttgtatagtgaaaggatcatacatatacgttgttcgttcagtttctgtgtgcgacattaacttcacctctattaatagtcctcatttttttaaatcatgttaactcgtttacagcaggttctttaatgaaaatatctgcgtttcataggtcttttcgcttaaaaagaccgccgttttctactttttttattaagttgtaatttcttgtggatcttcgccttcaaggtcagtgaagaaattttctaaggtttccctcggatcaagagcacgcccatcttcttcgacaatacggttaagcgtagggtcattattgctatctttatttttatagttgttataatcaactctttctgcaattcctgaattatcaacgcctttaaagtctttctttggcataaaaacacctcctagccctattgtttgaaaatttgaagataaaataagtggaaggttaagttatatttttatttcccgagaattaattagatacttgttgcaaagagccatgtacaacatgcttaattgttttacgaactggggaaactaaatcgtcaaaacttactttactgaggaggaatataagtggaaggaaatccaagcacaagacagtttcaggatgatttaaagcagtatcaaatgccagattcagtaaaacaacaaaaatctggaacttatcgagttggatttgaatcaaacactggaattgaaaaagtacagaatcagcaagaaggaaaagaaaagaaataagcttgatcattttatacttttacatgacgaggagggcatcccatggatcaacaaaaaatgttagcaaatgaattaagtaacatgcttacagaaaataagctgccgattacaattgaagaagatatccatgaaatctgcagaggtttacaatcaggtgaaatcagcgtgaatgatttgaaggaaaaagatccttttgttgtaaatgcagttcaagaagcaatggatagaatcaataaacctaactcttaaaatagatataaaaagcaatcctttgaggcagctttttgaatattgatcgttttcatcaagcaaaagactaactctttatagagttagtcttttgtccttcaaataatatacccatggacatgaaaaaagaatgacaaacgagttgtcattctctctcctacacatggcaagcttttagtttttagtcacaaggaaatgaaacatctaatcccactttttacagtgtcggttgtttctaaaaattagtatgtcatcctaacaagaaaatatacatccattatttaccacgaatacatctcttccacaataggaaacttaagaaaaacaaggaggtgacacaacatggcaaacaacaacagtggtagccgtaacgaattattagtaaacggtgctgaacaagcaatcgatcaaatgaaatatgaaatcgctagcgaatttggtgtaaaccttggtgctgatacaactgcacgtgcaaacggatcagtaggtggcgaaatcacaaaacgtcttgtacaaatggctgagcaacaacttggcggcggacgtttctaagacaactttataattgatggctgaaggaagaatggggctccattcttcctttttgtacgaataaaaaaggaaggagagatcatatgcagcaacatcaatcagctaaagaaaatgcgggttttactgagaaaccagcagcttctgcaacaaatgcacaaaaagtaaaacaagaaatccaaagagacgtaaatgaaggacaaggcgcaatgacttctcgagaagcaggcgcaatgcgcgattaaaaatcaatttgagcgctttttaatcatcgattctttgtacaaaaacctaaaaaagtaccttgattaactgaggtacttttagcactctattctatttcggcgcgggagctgctttgacttcgattgtttcatcgggtacatgctggtgaaacacaaaggcaaacattctgattctaaatatataaaagtcgatcctgccttgttcacctgaaaaataactagtttgtattttgtcccccgccattcagcccttcttttatgtacgcgttaacctgactatttgaaagcaatccaatatgtccaatgccataaagttgaatgtttcttgctccttgcagcctagagagactattagcaacaatttgatcatttatgctgtagatcgacgtataaagaattttttgattgagatctgtacctgggagtgctgtcgaagaaactaaaccattcgctcctcctaacgtcacgacattttcaatcttattccctccccctagatatttaatataatacagcgtgtttgctccgcccatactatgagcaacaatatctaccttcttagctcccgtctctttcaacacttgatcaatgtatcgagcaagctgaggtccattattcaaattgttgcctgtcttatctacaaaatcaatagcataaagatcattgcgatcccaaccttgagcaattaaatagtttttgatagcaataaagttataggacgcaccgctgattccatgaacaagaacaaccggattgtgatttgattcagctttagcattcgaaggctgaattcctaatgcagatacaaccagggataaagcaagaattaatgcgacaaacgttttcttcatttcttttctcctcctcaaaatatataagtaacaacatctatagattatatataaaaatcctaatatggtaaacttatacttataaggtatttaaagttatatttatttgttatctatgagtatttttatgataaaaatcatcacctaagcttttttgtaaaaaataaggaggcgaagaaagttgtattggatttatctatgtttagctattctttttgaagttgctggaactacgaccatgaaattatcagaaggttttaccaaagttataccaagtgtattgcttatacttttttacatttgtagtttatactttttgacattaacgttaaaaagtatagaagtttcaattgcttacgctatttggtcaggtatggggattataattattacgttaattggatttatgtacttcaatgaaagtgtaagtctgctaaagatcgttgctatagctctcatcattatcggtgtagtgacattaaatatgactggggaaaaagaagctaatgctagtaaatccactttagaagaacacattagataaaaagatgaaatatttaaaacctttttttctcgtcacagatataggatttattatctattggattgctacttattttcagcttatacctcaaagtgcggcttttaaagattataataatcgcataatcatagcttggaattggtctttcttccctctagatattcttatttcattcactggattatttagtctatatttatataagttaaataaggaatcatggaagggatacgctttaatttctttagttttaacattttgctcaggactacaggccatcgcatattgggcatttattaaggatttcgatttaacatggtgggcttttaatttatacttgatgatttaccctctattctttataaaactatttataaaagataacagtaatcaaaaaaagcacttttccatgtaataaagatattaatgtacatataaaagggacagatccccttaaggggatctgttcttcaagttaatctagttacataaattgttgtaatttctttcttttacgttgcttggctactatctttatccaattcctattagcctttaaaaaatcagtggagaaacgcccttgcttaagttccatttatttaaggtaatcaattcaatttcttgatctgcaaagaaacaaataccttttgcattgtctgcgggatagattccgctcgtcatcactttctcgccttcattaataaaaacttcgatggaagatttatcaacaaacagatgaagatgcaagtgattatcatttaatccaacaggtgcttttcttattcccccatcaccttcacctgatttatcacgattaaagataaacaaactttctagcctatcataagttaagagcgtttcctggtgagtgtcattatctgttctcacttttattccgaactgtgaagcagcttttgcgttaatttccacttcaagttcgtaacaatcacctgaaatacctgcaagttcttgttctccgttaaccgtgatatttttatactgcacgtgatgttgacgaagctgcttaagctctggaattggtttactaattatattcccttgtttagtagaaagctcacgcggaatagtcattgcgcctgcccaattgtgtttttgttcaggcatgctgctttcccacatagccatccacgctatcataatgcgtctgccatgttcatcttctgccgtctgaggagcataaaagtcaaacccgtagtccaaaagctgaaagtcttcgtgttgaagcagccctgttttatagtccaatttcccttttacatatccagcttgatgtaagttatggtagagatccccttctgatttcattccttgaggtgacatgacaagcacgtcttgtccatcaagactaaaaagatctggacactcccacataaaaccaagatttccttggcttttggccattacattcataaactcccaattcaacagatctcttgaacaatacaaaagaacttgcccttcatgatcctttgtacgtgatccaagaacacaataataatagtcgtctttcttccatacttttggatctctaaaatgataagggtgaatatctccttcaggcgctaaatcaataactggattttgaggtactttattaaaatgaacgccgtcttcgcttacagcaagacactgaacctgtcgtaagtccgtatcatagttatcccctgtccacacattccctgtgtacattgcataaagcttcccgtctttttcaattgcacttcctgaaaaacatccatccctatcgtattcttcactcggagcaagagcgataggaaggtgttcccagtaagtaagatccttactttttatatgcccccaatacattggcccccactcgggagagtaaggatgatgttgataaaacaaatgatactcacctttataaaagctgaatccgtttgggtcattcatccagaatgctggtgtagacacatggtattgtagtcgccaatgattctgatcaacagactcctgctcgtttaacacagattctattgcctttgagattttttcttgatgttgatttcttaatgttttcaaaagatttcaccctacctttctatacgtgaatcagtcaattgtgataaaaacagattaaaatgataaatcgacttcacaaacgatggactcgtaaggtcgtaattttatctggtttaggtgtaattctaaataatcatagttggataaaataacattttttatattaaaatctaagtttagagtcaactctttattatcaaagttagcaatcaccgctatttttttatcgttcaactctctcgtgtagaccatgatttgcaggctatctttaaacatgtcttcgtatttaccaaaagcaataacatctgaatatggactgctttttcttaaactaattaactttttatagaaataaaataaagaattatgatcttttaaagcattctcgacgttaataaaagagtaattagaatttatctctagccacggtgtaccttggctaaatcctgcatattcagaatgattccactgcataggtgttcgagaattatcacgactgcgtctccaaatcgctgctaatgcttcctcttttgagaagccttctttcagcgcagagtaatattgatcgattgaagccaagtcattataatgctcaattgatggatactgtacatttgtcattccaatttcttgcccttgatagataaatggcgttccttttaagaagaaatagacggtagctaacattttagctggaataggtcctatatcttctggtttaataaatttgtttaaagaacgaggctgatcatggttttctaaataaagcgctccccaccctgtgttgttatagaacgtttgactgtcagaaatggcttttttgaaatcaagcagattccaattataaggttcataccattttccttcttttcctacatctaaatcgacatgatcgaactcaaaaagcatactaaaatgcccgtcttcccccgcataaataggcaattctttgtatgataccccaggtgcttctgccacggttaagatatcatgtgaagtaaaagcttctttacgtagttcacttaaaaattcatgaatgccttgttggttggtttcaattacattcattccatcatgcgaatcagcaaagtcctgtcgtttttttataaatgtaatggcgtctactctaaagccgctaattcctttatctaaccaccatctgaccattttataaacggcatttcgaagatcagggttttcccaattaagatcaggctgttttttagaaaatgcatgaagataatactgtccggtttgctcatcatactcccagcacgaaccgccaaaaatagatttccaattgttaggcggggcctcgtcttttcttccgtttctccaaatataccaatctcttttaggatgatttacatcactttttgattctatgaaccattcatgttcatccgaagtatgattaactactaagtccataataatctttatatttctttttttagcttcatggattaatagatccatatcttccatagagccaaattcctctgcaattgcttgataatcagagatgtcatatccgttatcgtccattggtgattgatagactgggcttaaccaaataacgtcgatacctaactcttttaagtaatctaatttttgaataactccttttaagtcaccaattccgtcaccattagagtcataaaaacttttcggataaatttgatatacaactgcttccttccaccattgtctattctttattgtagcgctttcttcattcattctttcacttagttgaaccatttttatcagctcccgtatttttatattaaaattatgtacttattcttcgttcatatggtaccgataccatatatggttaaaaaaatttatgctattaaaaagtctgatataacccttctcatttaagataaattcattgtattacatcatgggaacggtttcaacaacttttctgaaaatttttcaaaaaaaggtgagaacgaataaatccagctctcaccttcatctgatatctcccattacgttgaacttcgaacaaccagctcgattggaagttcaaaagtttccactttcacttcagaatcattcaacatatcaataagagtttccattgctttaatccccatctgatcaataggttgtcgtatagttgttagctttggatctaacatttgcgcaagaggttgatcatcaaagccaataatagccaaatcattaggtatttttagaccgcactctttggcttcaatcatcattcccccggcaatttcatcactccctgtaaatatagccgttggacgatcctccattgacaggatttttttaactacttgttttccgtcttcaatactgtgttgattaacaaagatccattttggatccggctcgatccctgcctcttgaagtgctttttgataaccttgattacggtccttgtccttgccttcctctgcaaacaatccacctgtacagtacccaattttccggtggcctttttcaagtaaatgctttacgcctatatacgcacccttgtattgatctaatcgaacaattggaacatttgcgttgtttacatattcattgcataacaaaataggaccagattcagtaaacggttctatgatactccagtcattttcaatagaggtcataataattccgtcaacttgctttgtttttagtaaatttaaaaagaccaattctttctctttatcttcattactttgaaagattaatacgtgatagccgtttttataagcaacttgttcaattgaatcgactaaataagagaaaaatggatttacgattcttggtacaatgacaccaattgtagttgttacctgtcctcttaactttcttgccgaagggttcggggtatagttaagctctttcattgcttttagcaccagattttttttctcttctgaaacatatgaatgattgtttataacacgggaaacggttgtttttgataaccccgataattttgctacgtcatatatggtaggcatttatttatcactccatcactaactgaaatcagtttcatacttattttacgttaaaaaagagccaaaatgcaatgaatgaattcgtttgcatctctactatatcgtgtgttcaataagaatatcagtaaaatcgctgtgactctttaaaatagaacctttttatataaaatgtttcatgattaataaaccagcatacttaaaaagatttattttataagcaagaaaccagtaccacactcaaaaaacacattatacttaaaaaaaccttttttaaagggcatttttgttaattaatttcttgttgacatatgaaatcggtaccatatataatacaatcaaatcgaaaacgctttctaaataaaatttagatacataaacagcaaaggggatttaaatatgcaaaacaataaactttactggaagctaagcagtttctttttcttgttcttcttatctattgcctctattttcactttttttgctatctggttgggacaaagccttaacctttccggagcacaaacgggtattgttttttctgtaaacgctgtcttcactatgcttttccaaccgctttatggatatatctctgacaaattgggcttacgaaaaaatttattatacttcatttcaattttagttattttatctggaccatttctcattttcatctatcaacctcttttaaactggaatttttggataggagccctgacaggcgggtcttatcttgccatcacttttttagctggtatctcagctatcgagtcatatatcgaaaaagttggcagaaagtatgagtttgaattcggtcgtgcaagactttggggatcaataggggccgccgtggcagctgctattggaggacgaatgcttaacattaaccctgatatcaacttttggattgcatcgggatcaggcattctcttattacttgttattttccttacaaaagtagaagtatccactatcgaagaaaagaaggcaaagtccctttctgtgcaagatttgggcagtttatttaaacgaaaagatttctggatttttatgatttttatgctcgggacgggctgtatttataatgtttttgaccagcaatttcctgtatattatgcctctctgtttccaacagaacaattaggaaaccaaatatttggttacttaaatgcaggtcaggtctttttagaatccggtatgttattagttgctccatttattgtccgtaaagtaggtcctaaaggaggtttaattttagcgggaattattatgattttgcgcgtaataggttcaggtctagtatcagatccatacagcatttcatttattaagcttcttaacgcaccagagtttgccattatcatcgtttctgtgtttaaatatctggctacacattttgatacaaaattctcttcaattttatatttggttggctaccaattcgcgatgcagctaggagctgttatactctctcctatcgtaggaaatctatacgattcaattggttttcgtcaaacatacttaatcatgggggttattgtcactatctttactctatttggtgcatttcttttacggaacaagaatcaagcatctaaagataggaacgattcaaaacttactgcttagaatcaggaaaaatataataaataggcttataacttcaaaaatgtcttttaaggtgttcctattaattgtgattctcataattttgaaagcctttgctaattatagcagaggcttctttttggtgagtttcttctattataaaatgatcttttttaaagtactttcatattgctttattactttataaaatattgttttcttcattttttcttctttcatgacttgtacagttttggtttaattttatttccttcatttataaacttccataaactcctagctaacttcagctttaagtctttcaaaagttatcctcttattcagcgcagcctcaattccctctccttgatgcttgcgaatacgctctctttcttttaggagcacctaaaacagaatttgtagaattaaatccgcaataaatgttccagtactagcctagccttattactgagctgtatccaacaatagcatatccaaaactgtaatgactgcctcaccctcatcctcttttttgatggcattctactcttacaggctttcccaaaacgctctaacgaatagagatattggcaggtctattcaatctcaatccagttatcacactgtagtaacttttatgttgtgttagctactttcctttggaacaggttaatgaaggaagaatgaatgtataaaaaagtaatataaggaaaaattactagtgaatattggaaaaaccaatgtcctcttcagtcgatgacatacaaaagtggagggttattaaaatatgaacagcgcctggaatcgcctgataaaaaaagccagaaaaccaaaaaaaatgccccctcagtatgaagaaaccacttcgaatgatgaggctcttcattcatctttggctgaaaatctaacaaaagtaaagaattcgttaggcaacagtggagatttagtggttcgagattttaaaatggggaagccctttttatgtaaagtagcttctatttatataaatggattaacggataaagaaattttaggaaactccattatagaaaggctaatgaatgatgtagagatgattaaagaggaagccccttatggaccaagcgaattagggatttacataaaagaacatatattaactattacgaatgtgggagagataacgaatttcgataaactttttttccatcttttatccggcgaaacaattgtcttagttgatggatggaatcgtggctttgcctgtgccgcgcaaggaggagatcttagagccatttcagaacccgtggcagaatcgtccgttcgaggccctcgagatagctttacagagtcccttatcactaatacagcaatgattcgccgtcgtattaagagcccaaacctctggttagaaacgaaggaaataggaacaatcacgcaaactggcgttgggatgatgtacgtaaaaggcattgtcaacgataagcttcttacagaaattaaagaaagattaggtaaaatggaagtagatgaagttcaaggctcgaatacaattgaagaatggatttccgatgaaacttggacaccttggccaactgtttttatcacagaacgacccgatgtggtggcaggaaatctattagaaggaagagtcgtgatttttgtgaatgaaacacctacgcctcttattgtccctgcgacttggaatcaatttttccagacggcggaggattattatttgcgttggacaatggctagctttttgcgcatattgagaatcatttcttttttaattactcttcttggcccatctttatttattgcgtttctttccttccatccagaattaattccaacaccgttgctgattaatttggcagcccagcgtcaaaatattccatttccaattattatagaagcgctattgatggaatttacctttgaagtattgcgagaagctggtgttcgtatgccgcgtcccgttggtcaggctgtttccatcgtcggggctcttgtattgggggaagcagctgtttcagctgggattgtttccagcgcgatggttattgtcgtggcagctacggctatcgcaagctttaccattcctcattatgcaatgacggatgctactcgtttacttcggttcggaatgatgattttagctagtttttttggattatatggtattggattaggagtaatcatgttagtagctcatacgtgcagcttgcgttcctttggtattccgtacttagctccttttgcccctgccattttagctgatcagaaagattccatcttccgttttcctttaccttttatgtctaaacgcccccgtttaattagtcaggtgaaaacgaagcgaacagaccctaatcaaaatcgcgggccttcaccaaggaatggacagatgaaaaatcaagaatcaaagagggattctgatgagacatagatcattgatacttcttttgctttgcgtattgttagtcttcttgtcaggctgctgggacagagaagaactacagcagctaagtatcgtttcaggaatggctattgataaaggcagcaacaaagtaaagaacagatatagagttacggttcaaattatcaatccttcgcaagtagctggtggccaacaaggaggaaaagttcaagcttcgcctgtgacaacctttactgaaacaggaagtacccttgccgagacccttcgaaagatttcaacaaagtcacctggagagcttttctttcctcaccttcaaattttagtaatcagcgagaaggtagcgaaccaaggaattgaagatttatttgatatgatcgaacgggatagccagtttcgggtcctttttccagttttaattgcaagaggacatattacagcgaaagaaacgctagaagtcacaacatcattagaagccatcccttctgcaaagattggaaatgctttaaaatcttctgaagacgactggggaacctataaaagtacgcgtgcagatcaagtgattcaggggttaaaagaaggaagcgtagcagtcacaggtgttaagattaatggggagaaaaagagtggaaatgcaacaacaaatacacaacaagtttctccaagtgcaaacattgaaattaaagggattgctctttttaaaaatggaaagttaaaaaaatggttggatgggcctcctgcacgaggagtgacatggattacgaacgaaatgaaacgaaccgtgatgaaccttaattgcggaaagaaaaaggatgccattgcaattgaaatttcgcgttctaaatcggctacccatgtaacattcaaacatcagaaaccagctatctatattactgttcactcagaagggacagtcttagaaaataattgctctatagatcttgccaaatcacaagctcttggccaactagatgaacaattagaagaagagattaaacaggaaatactattggcagtaaaaaaagctcaaaagcaaaaaagtgatatcttcaattttggtgaaacggttaatatagcaaataagcatgtgtggaacaacattaataattcatgggaaaaagacatttttccagaaacagaagttcatgtgaatgtacaagctattattcgtcggacaggtatgacaaccaagtcctatataaacaaatagaataatcataaagggtaaaggaaggagttgagagacgaatggaaaaagcaaaattaagtgtcattcaactctttgctctcatgtttatcttcgaaatgggaacggcattagtggttagttacgggacaaatgccagaaaagatgcatggcttgctattctcctagccctttgtggaggaatcgtattattttacatttttcacttcttatatcgccaatatcccaacttgctcttcactggatatataagagaactatttggtaaatacttgggatggatagttggtttattatactgtcttcattttttgtatatttgcggaagaaatgtacgtgaattaggggatttattggtttcatctactctgtcggaaactcccttactagccattaaccttacacttgtgcttgtgatatgctacgtcattcatctagggatagaagtagtagggagaacagcagaagtatttatggttgtcttactcttacttggagcggcagggaatttttttgttcttgtatcaggagatgttgattttcaccagatacgtccctttcttgaacgcggatggaagcctatctttaccacggcttttccccaccttctcatcttcccgttcggcgaaatgattgcttttacaatgctattaccatacttaaaccgtcctcaattagcaaagcgagcatggttggcagctatgatttcgagcgggatgattctaagctggaccgttttgttaaatacatccgttcttggtgtagatgtgatgcaaagatctgtattccctacgttgacagcagttgggaaagtcaatctattcgattttattgaaagattagatgcaattgtggtattcactttgttgattaccgtctttttcaaagcatctatttatctatatgccgcggttttaggaatagctgatttatttaaattaaaaacgtaccgtcaaattcttctcccaatcggaactattgtcatttttttatctctcgctatggcttccagtttttcagaacaaggagaagaaggcttccttaatcattacctttcgcttgctcttctaattgttgttcctatgctcatgctagtagtttctgttatccgcaatcattttacaagaaaatgaacaagcaatggttttaaactaattttattactaatcattatgaaaacttttagtaaataattaaaaaagcccgaaggtcaaacataataaagaaaggagacgcctcaaagatggagaaagcaaaaataagtgttacacaactcttcgcccttatgtttatcttcgacttgggtacttctctcattgtcagttatggaattccagctggcaaagatgcctggcttgctatccttctgggaatgggaggaggcatactcttattctttgtttactatatgttatttcgtcaatatccgaccattccccttactggatatgttagaaaaatatttggtgaattctttggctgggtgcttggattattatactgtttgttcttcttgtatattgcagctagaaatgtacgtgatttcggggacttattgacttcgtctactttaccagaaaccccattactagcaattaatctatcgcttattcttgttatgtgttatgtcatttatctagggatagaagtaataggtagaacagcagaagtatttattgtcatcctgctattatttgggctaggagctaatttctttgttcttgtatctggaaatgttagtttaaatcatatccgcccctttcttgaacacgggtggaaacccattttaactacagcgtttcctcctgttgtatcttttccatttggtgaaatgctcgtatttacgatgctgctaccatatttaaatcgtcctaaactaataaaaaaggtgtggttatctgcattaatttcaagtgggttaatcctaagctggacagctgctttaaatatgtcggtgctaggtttggatgtaatgcaaagatctacatttcctaccttggctacgattggaaaagttaatctatttgattttattgaaagactggacgcaattgtagttttcaccctgttaatgaccgtttttttcaaagcatctatttttatgtatggagctatccttggaattactgatttatttaaggtgaagaaccgtcagcaaatcattcttcccatgggctttattttgatctttctctccatgacaatatcttccagtttttcagagcatttagaagaagggtttactattacattaaaatatcttcatgttccttttttgattattattcctttgtttatgctggttgtctccctcattcggaactatgtgaagaaaaaaactagttagaacggtatcgtttctctttttttttaataatcataaaaatttgttgaccaatgacaataagaaaaagtgcagctaacatgatatattcagcattactcattacccaaaaaggatttagaaggtgcagaaatgaatcataaaaactaaaacctaatagataatccattagcaagaggtttaaagtagataataaaaagacaataattattgctagaaaaatcttcatgttcttccctcctttaatttaaagtaaatatattatttgtcaaaaataaggtttttaataataaaccttgtcgtttgaaattaaaagaaaggcgtaagatagtataaaatatcttgtgtaaataaataagtacaaaaaagaaggacttttcttagataattaagtaacttcaaccatcctaaagaaagaaggtcttcctctgaatgagtttataacagttcttgttcaagctttattccctaacgaagagtaactgcacccttccttgcttctgtatagtcagcgctttgcgacaagatctcatattgattttaattaagctcgtacagaactaaaaatgatggttaaaacaaactaaggaataatttctataagagaagaaaattcattttatatttatataaaattattgatcagctcttaattttcgctcctcaatttttacgttagaaccacaacgagtaggaagattcataatatatacatctttaaagatgtatatattatgaatcttttaaggtaaaagactattttatttgcaatgattttagtaaagcagcctgtaattctataaaagagagcatcatatatagataaacaaattcaactatacaagtaatgttttttataacccgatttataaatattttcatatcatttatctccttcatatataattcagccttctggaaattgaaaaaagtatagcgaagaaagaattttaaactattttaagcaatgtaatagtaatcattaatcttgataaaattatttaattaggtttgtagaaaataagggtttgtagaaaataagttcttagttgacctataatcgttttgtttcttgtattaataccttttttcttcttttataaagatcatctcgaatttctcgtgtaagaactccatcttctattttttctgcaatatccattaatctctcaatatcagaaaaagaatacctgcgggtaccagaacaggtacgttcaggaaagataagtttttgagtttcataataacgaatttgtctctcagacaatccggtcatttcagtaacagttttcatagtcattatttttttctctcgatataaataattattcttcaaatatatcctctcctttatctatttgattggttttaaaataataaagaataagtaagtatgtatgttatgaataataaatctaatataatatctaaattttcaaataattattcctacaataacaacaacttatacaaataatctacaacttggttataattcctaacacgaatatttaattagtagaaatatattagatatatatttattagagaatagtcacaagattcctgatccttaatggataatactgaaaaatattcttagtttaacaatctaaagttatatatgttaactaagagtgtatagaagatacatcctaaaaacaaaaaaactcctgctccctgaacagtagtcttttctatttacacgtaaccctatatggaataatgatttacatcacctttagtagcatgctcggaggattaaacattaatttattaagaacgtttttctaatcatctaaccttttacggtcgtctgcttggggaggctgttccatccactgattatcaatcatatctttcccaatacggctataaatccacaagctatccaaggccgccttttcacagtgtgctgaaatatcagctctcatacttgcaatgagagctgcgttataataagtaactgctacaccaaaaaagaaacccgtttgaagaagcataagccgatctgaaaaaggagaaatattggaatttgtaacctctgtttcgcatgatttaggcagatgaagattgtctttggttaataaggatgaaaacacatcaatgtgtttgttttttacttgcaggcttttttctaataatgctcgtacgttttgattttttgaaacttgtgaaaagccgaggatcatcgctttggcaataaatgttttgtttaaattaaaataagcatgtccactttcaattgtatttatcggtctctgtttaccgaatacatccgttacatagttgtagtgttcaatcatttccaccttgttcggtgttatgtaagtaggtggttgctgataaagttgctttgaaacaagaaggtccttagcttttttataaatctccatcgcatcaaggttgcattgataataaaaatctacaatgtctgggcgtaaggaagtcgcaaatgataaactcatttcattatgtccgtgtgtgctcatcatataaagggatttaagacacaaaacatccgtaaatagaggaggagcttctaagtttacgtcttcttctgtaaatcctttaggaataggaaacttctctttcttaaataatgcttttaaagcatctatgtgtttaaatgaatagtgaagagccgtttgaaaaaggctatgtatctcaggatcttgaatcgtgtgaagcatatatttatttacacatacagataaagtttcacggatatagtgtgtccataaatttgcaatttcaggagatgttaatcgattctttttttgcaattttccgttcctccgtatcaacgctcatttttacttagcttcccctccttttaagctttcatacaagttagctttcatactaatatttccgctaaaaaagaaaaagctgctcaaatgagcagcttttaaaaaacacatacttaatgaaagatgaggagttggggttcctatgttcttagtttgcccacaaactcgaattttattcttcttcctacctattcatgcttacgatgttctccgtataatgatttatcataaacggagtcaccctttgcaaaaggagaatcttctctacttcctaagaactgatttgtttttgtctctctattagcttttactagcaataatacttttcctttttgcagatcatctgcataaggtcctgcttctgtaagagggacacctaagttaattaaacgcttttctactcttgctttatcactacgaatctctttagggtgatctggtgaaaacatatgtttaattttatccataatcgactcatcctggtgattttgtgctgcggtttcaaccttcttgacgtcaattccctctctgctttctactctcgaatagtcctctttatcgatatctttgctggttacaagagaaaggtccttctcttgaaaaccttgtgtctttaagttttgaatagcggttacaatatcttcttcattatcatacgtacctatcacattttttgtcatgagcagttcctccttctagtaaaaaaatggtttatatcaattaattcgtttatggtaattgtaataccctgacctctttttctaaaacattcaaaaaattgaacaatcattgtttagatagatagcccttacgggaacggcagcaccaaaagttcgcaaaatattaaaagcaattcaacgaagctatggagcttcatgaaaggatcgctcattatatgattgataatgaaatgtatcctgcctatgttattaaagggcaagtgtggattgacacccctattgatttccatacaagacttcgctttccacgggcgggcgctagaagcaacaaaacatatgaaacctacgtttaccatcataataaaaagatccgaacgatgaaccgttcggatctttttaaaatacgtttgtctcagcctctttttaagagaagatttaattgaaaaaaatcaagattaatgattgttttgtttatattctgcatcaaacgagttttcaccggcatggacagaaagcaaggtatcagcatagccaactagcctgttgacaagttcatctgcaattgcataaacaagaggatgggtttctcctttaaatagcgctggatcatctaagatgactgtagtgttgataaacacatctctatttccataaaggttataatgaatcatcgctttccctgcagctccacctgttcttggatcttcataacctggaagaaatacgtaccattcttctgccgtagcagaccggaaatttttcgtaaaggtcattccattgatcactttttcaatccgcattttttgctccaaatgagttgcatctacaattttctccttcataacgtactactcctcatcatattagcgaaattcttcgtcagcaggcgtagcctctacagcaatttgataagcatctaaaatggagtcacgttcctcagaatcagtcaatccaacaagatattgttcacccttttcatcttcaacgcgcatcaacagtacttctccgttcgattgcagcaaagcataagtctgatttctcatatcaaataaagcctcaactgcatattgtttttcaatacctttttcattttcaatggttataaaatctctttccctactcctcacttctcgttcacctccactaaaaatcttcccggttacttacccgttcttctctgcttctataattgtataaaatgaaattcaatagcgaaggcgaatagggagtttagctatggatatatctaaaaaagtagttatttattcgtctattggagaatgaaactttaagaaatgattaaaaaaatgtttttacgatatcgtgttgtgaatgacattcgtggcagtaacaattaatttctaaagcatcttctgtgagggtatgtatagtttcttttctgcactttttacagtattcttttttctgacgtgtctttgacaatacaatctcttcctctcttacatttttaattttatgtttcgtataaaaataaccattgatacgtccctaaagaggattgcaatagcaattgcaaccctcttctcacatggcaacttttagataacaaggaaatgaaacatctaatcccactttttacagtgtcggttgtttctaaaaattagtatgtcattctgataaggaaataaacacccatcatttaccatgtatatacttcttggcccctaggaaacttaagaaaaacaaggaggtgacacaacatggcaaacaacaacagtggtagccgtaacgaattattagtaaacggtgctgaacaagcaatcgatcaaatgaaatatgaaatcgctagcgaatttggtgtaaaccttggtgctgatacaactgcacgtgcaaatggatcagtaggtggcgaaattacaaagcgtcttgtgcaattagctgagcaacaacttggcggcggacgtttctaagacaactttataaagtgatggctgaaggaagagtggatacccactcttctttttattatggacattttttatttatcattacaagtagaaagccacataaaacatgacaaaacaaaaaaactgccaaagaaggcagctctctgtataacaagggtattgtgactgatgcccttataggcatcttgaatagtatacgtaaaatagtggattgtattcactgataaaattcctttttatatctaaaagaataataaaacatcatatggaaacgttaagtatgtgcatagtaagaaaggtggcacattattatgaatatgttaaggaggataacaatgggtattttaagtggaaatcctacagatgaaccgatgcattacggtgaagtatttggaacatggtcgtttctttctgcttcgaaaggattagtagctggttatcaaacgtttctaaatcatgtaggggacaaggatctacataagttggtacaagaaacgattgaacaatgtcagcaggaaatgaaaggtgtagaaaagctattaaaagaaaatggagtggctttacctccaactccgcctgaacgtccagaagcttgtttagatgatattccagtaggtgcacgtgttcaagaccccgaagttgctgcggctatttcactggatatagctgctggtctagttgcttgcagtcaactgattggccaatctattcgcgaagatattgcagcaatgtttggtcaaattcacatgcaaaaagtagctcttggtggaaagtttttgcgacttaacaaagaaaaaggctggttagttccaccacctcttcacaagtcaaaaaacacggattgttaatcataaaattcgtataaaacgtgaaaatttcacattaagtcaatcctacaacatgctataagaaggaactgctgattcattccacattagcagttctttctcaaataaagagcactaacgagagcaaactactcaagatgcagtagagcattatcaatataataacatctatatttcaacgactatgaaaactactgcgtaggagcagtagttttttccctttttattatgttgtattgaatataaaaaggcagtggacataatgtacgtctataaacagtatcaaattaattctggaatacataataatcttttaagagaaactactaacaaaaaacgataaacccttagttatcatatataaaattattttattcatctttccaatgtttttaatcgaactctgggcagaaaaaaagacaaatttaattagatggagaagaccttgaaaatgggaaatggtatcatactttacttagtcttacagtcaaatcagtattaaacaggttaatgatcggagctataagagcattagatgaaaaagtagaaaagagttcttgattcatgaaataaaaactaaattgaagatatttctatatcttgaacaaatgagttaagacgccgtgaagcatctaaccacctctttatggaaaaataaagagctttttctcgtcaaagaacccttcattttgataaagattaggtgtatatcaatgaactgcataaaataaatgaacaagaccatattaaatatggatgataggtataaaaagtatatttttttcgaagccatggaagatcgatcgtaaatgaataattataaaaatgacaatagtgcaagacgctatattgctcatgtcagtatatttggaacgactcaaatccatttaagaaatccttatattatcgcttggtggtcagcggcttttccagggtttgggcacctactactgtctaaataccttcgcggctttgtgttgttcgtatgggaagtcgtcataaatattaaatctcatgtaaatttagccatgatttattctttccaaggaaacattgatatggcaaaagaagtgcttaatacaaggtggcttcttatttgtatccccgtttatatttttgctatatgggatagttaccggacaaccgttgatttaaatagaatatacgtgttagctgaacgagaaaacgtatcaacatccaagcttttgtattgggacaagaaaaaaaggtggagtgaaaacatgcaggtcttttctacatttgaatactccagttacatagaattagctgtttcagagctagaaaaaaaagggataaagaaagaagatatatttattgtcccccttaataatcgaacggaagatcgccggctttttgatagccttcatcgagcagatggaatttctcttattgatctaggaatggctctagccacagccttttcagtcattggtgcaagcattggttttaaactaagctggggccccatctactggggaataattagtgcttttatcggatttatcttaggactaggaattaaactatttatgtttaaagtaatcaggaaaaatcaacggcttttacgcggcaaacattcggaagtcatactcattgttaattgtcgtacggtggacgccggagtggttgaacaaactttgtggaaaaaccttgccttaggtgtttcaaaagtcagatctgatggcttataaaaataagtcatcaccgtacaatataatggctatataaggaatgaatgaattactattcaggattagagataacttccttaacgcattgagggagtttttctgtttttaagctgtatactctttagttagtataatgtcatttattagaaccaaaaaagcttttaaaaaaagcttttttggttctaacatatgttaattaaatgccattctaccaacctctttgatttcttaatgtcgtaatatgagcaacgtgatgctttccatgccaagcgtaagtagctattaattgctcaatcgtcacttccccgttttcaggatggtggatcattttcttcaaatctttttcatcaagggagtttaacaatttatgaagccgcttatgtaaagctgaaaaaagttggagagaaacttctataggtaaatcattatcaggcaaagttgaccaagccacttcatcatatgctttaatagtaggcgcttgctctgttaaccctaatttaaaacgagtataagcattcatatgggagtcagctaaatgatggacaacttgacttaatttccaaccgccttctcgataaggcgtagctaattgttctttggtcagtccttctacagcatcagctaattgctttggtgcatctccaatgtcatgaatccacccttgaatatcttctttctgaatattttctttcacggtaaatttcccaataggatattgattaaacatatttcttcctctctttctatttttattaatatctattatatcaattttaaatataaataaatttaaatattcagaattaaatataggtgaaaaattataatttataaatatggtatgtactttcagttaccatcatgtaccttctccgcagtacaaagacctgcctttgctataattcatgataatcccccctaaattaggccgcttttaattaaaacaataaacatatagataaacttgccgtaaaattaagttgaggtgagtaaattgagcagtgattataaaagctatttctacaaaaagttctttttaatatattttattaccgttttcttatttattagtattgatattatagaatcaggaagaattacacttttttcttttgaagacagctggaatttcattttgtatcaaactggtttttgtttaatttctattggcttttttagcgcattcattacaaacttattatggaaaataaaaagagttaaataaatacgtcatagacccctacagaaataaaaaacgaccttcagcgatgagaagatcctttttggatatttgctttaagcgcttgtaatcttgattgagaatcattggtttgtctaattactttttccacgatgtattgatatccatgtaaaacaacggctaaaaccgtagtcatcccccagtacatgcttggcgacatctttttcattttaaatgtgacgatagcattagaatccaatcttcaaaaaagaagcatctagcctttaaagaataaatgcttcctctcctttacaccttataaatttcattagacgacagccagtcaacgaattgatgatacggataataggtagtccctttcagctctatctttggagctccgggatatttagttaacagttcttcaatttcaccatttggaattgtattaggaattccttcttctttcataattgatgccattgtaaagaatcaaaagaggcataagcatatagttgaactagtatggtatgttgtgttgtgttcgctgttataactgcggccattagctccatacttatttcactacttatctcaatagatgataacaatttttttataaacttgggtttatttaaatcattcctctttttttctcttagttgctcagtgccctttggaatctgctctatcttattgaattctaggataaaaaagaattttttgcagtaaataaatagtttatatagtctataccaatctagctgctatatcgccttgctgaaaagaattggacaaccggaaaaataattaaacaaagacatatcactacaaataaaaatatgttaccaaaatcatttaaaatcgtaatcccgcttattaatgttctaaattgacctaatgtaaacttcccaatttgaacatttactgctttttctaccttttctcttcattacggagtcatcattacttttttaacaccggtatccatatttcacttttaaaggttggcgacgttacatttttatgttcattccataatatttccggcccttctacttgttcataatttgaggatggaaaccattctgaataaattcgtccccatacattttgtaatgtctcaggaaatggtccgactgcttcgaatacagcccatattccagctggcacttcaagttgtactaaatcatcgggacaatccttagttgtagctacaccgatataatggtccagctgtcctttttcctccattctcccttcagaaaagttcagagatgcactaagcaaacccaatggtgtaacattagaaagttcttttaatttacgtactgtttcatcgtttaagctttcccacatagcagcaatctttgggttaactccatgaaaaatgataggaactctttctttaataccaactatatgaaaggcctctttttcctcaattcgataattcatttcatttcctcctttaattgataactgaaaggtcatttttggaaatgctttaagtgaactcccattttttttagcttccgaaggagttataccgtgtagattttgaaaagcccttgtaaacgaatccggtgagctataattgtacttgatcgcaacatcaatgactttaatgttactatctttaagttcaaatgctgcaagtgtaagtcgtcttcggcgaatatattctgataaagtaatacctgcaagaaaagaaaacattcttttaaagtgatactcagagcaaagagccagccttgctacttctctaaagtcgatatcattcgttaaattctcctcaatatagtgtaaagctctattcatatttctaagcaaatccatttgtatgacctcccttattatcagaataacaggatttgaataaggctatccgacatttcatgcacagttatgcaggctttttccttctattcataagttcctacacacttaaacaagttattcaaggtgcaatttcagctagcataataactttagaaaccaacaaataaagagccttaaattataagcctctttatttgctctttatttacctttgttttttaaaaataaaagctcaagcacactattacttacactgcatctgtcattacatataaattggatggaataattttgttttctaaaattaagtatggatgacacttcattaaagcaagtttaagaacttccggtactctctcttcatcatacgcgcatactaaatgtaatccgcctttatttactaatttgtcggcttcattttcaaactcttctaaaataggtataattccttcttgctgtccccattcgacatgagcccatatttgaaaagccgtattgtttttataaaaaggatctaagtgtttagagagatgttcaaaaatgatggcaggctgaaagcttccacttgaacagtaataatcaaaattattaatagtatgtatatatgttaattggtcttcagttagaattccctctaacttttcaaaaattaatggaattaatctttcactttctataactaacgtatgcctctcctgttcaattcccgacacaatataagacgcaagattatctaagtaacttctcatgtcgtcaatattatagtaaatatgaacgctttcattattctgtattaattgagcaaactgatttttcaagtgtgtacgctcccttatataaaatcaacctaaatttcaagaatcttaaactagtaaattgtctattcgttagaacaattttacgctttgcattcttgtctgtcaaaactggatgttcccagctttgttttagggtgtacagctggtttttagaatagtgtatctatnnnnnnnnnnnnnnnnnnnnnnnnnnnnnnnnnnnnnnnnnnnnnnnnnnnnnnnnnnnnnnnnnnnnnnnnnnnnnnnnnnnnnnnnnnnnnnnnnnnngtacagctggtttttagaatagtgtatctatattgattgcaaacgagataacagttgcgaccgttattccggcgctttgactaaataatactatacccttctcaaatacgattaaaacttaataagaaagaatgaagttttcttacctcttcattaaataaattcttatgtagcattgataagagtattaatcatctattttttagtttgtataacctatggaaaactagttactacaaaacacacaaaaagaacaccacttgctttagtaagtggcgccttttcttttaaaatatttgagtaaaggctacaattaaaatcgtaattccgcttattaacgttccgcattgactcaatgtaaatttcccaatttgaacatttgcggctttttgccccaccattacccctagccatactgtgataaaactgccaaatgctgatgtaagcgaaatagctaaaggtgataacccaagcaaaccagctcctagaccgtttgtaagtgcattcgctgaaagtgctacacctaaaacactgctttctatccatccaatagagtgtacttttacttgacccttactatctaattgatcaattccgttatttctctgggagccgactaataaaataattcgaatcccaattagcgttaataatacgacggctacaataacatggaaaactcctggtaagatggttgaaatccacctaccaaacgtaattcccaccatgctaaagaggaaacaaatagccgctatcagtaaattagaaagccattttatccttacctttcgaactccgtatgatattcctacaccgaagttatctatactcgatgataatgcaaaacctaatatgaataaccattccattttgtattctccttttgttgataatgttgaggagatttgcttatttgttgcatatattgttgataaaccttcaatacaataatcactgcgcgttgaaaaatatgaagaggtgaatcgctatgtctaagatccaacatgaccaaagccttggtttgttattaaggtctttattaaaggaaaatgctttatctatgcggaaacttagctcacttacggggattgatacggcaactatctcacggattataaacggaaagcagcaagcaaatctacaccatttaaagcagtttgcacactatttaaatactcctcttggagcattgattgaccctgctggagctacttcaaaccatacagaaaatgaattagaaacaggcattcattactccattgataaaattcaagaaatacttaaatcttttaatatagtggatacaaactttacgattgaacgtgtagaacaagaactaacaaaatataaacaatatgcacagacagacgaaggacacagcatgatttgtaataactttcaaaccaaaatagagcaagtaggcagtgttggaacctttattgatcaactaaagcaaatgtatcttgaatactgtaacgaagaaacgtcagctgccaaacgctctattttaggaagtgcgctattgtattttattttgcctaccgatattatcccagactatgtctttccaatcggctatttagacgatgcaatagctgtacaactagtgatgaatcagcttacagaataaaaactgaattttattaagcgaactggacgcggcatgccgctagttattgtgaaaacggaactttttctgaatcatgacgatgagcaggtaaatattctatggctttctttaatttagataatttctttggcacaatctttttgatgatttgttctttttcacatcgtttgcatgactcgtggttgcatctatgtgcacacatacctaaagggattttctctcctacaaatggatctatatagactccattttcaaacagcttactcttaataagattttcattttgcaatctgcagcaagtaacgcaatagtacattcgttttccactctctttctcatatttgattttgaaacatcttatgagaagtcatcaacagaagtgcttgttcctatattaaaagttgaaaaaatctcaacaggcgttgatgaatactcaacacacatcacttacaaacatatagtttaataatgacatcataaagagtgtcatacattgaggagggaatgcggtgaaaataagaggtattattaacgctataatcggtatttggtttgttattgccccgtggatgcttggtttttcatacgatagaggagctacttcagcaagtattgtatttggaattctccaagtcatcacatctcttttaggagcgaataaaccaggatggaattcatggcaaaactggattccccttattagcggattatggtttgttctttttccttttatttattcattaacaggtgaggtactttggtctagcattatacttgggttaatgaccgggctatttagcttatggagcttgaactctaaattaaaactaaaagctgtaagttaaaataccaataatattccactatttacttaacctgtggaagatgccgccacgcatcgatctatgggagaaacgattctgcagcagaaaagctccctacagaaatagggagctttttctactttttatgtaaagcctacacagattcagtcaacgtaatgtactttatagaaaataacaaaggtgtccctaattgctagaagacacctttatggactctttagaaagctaatttttgacaaccattatttatctctactcatgcaaaatagatactaacgaactttttcttcacggtcatctcttcttttaagaccaaacagaccagctagtcctagtaatcctagtaattcccaaggtgaatcattgtcatcatccacatcagttgctgtagtgacatttcgagtatttacgtcatcattataagtatttacgtcatcattataatttgttctatctacgttattgttttcagcattaaccggcaagatgaaagtcatcatagctaaagctaacgtacataataaaacagaccatttttttcgcataatttctcctcctttccttttgttaatagataaagttcccaacgttattagttactattcgttaagtaaatatatcttttgaaactactcactaatacccaaaataaagaagcctttgaaattagtatgaatatatttcttgtctattaagcaaactagccaagatgcaatgaagcatcactcatgaaatctaattacatcatagaaaaaactaccttctccctaatggtatgctccccttatagtagacaagtaaaagaaagcaacctattctgtctactatggaggggatttttttatggggaaaaagaagagaacatttgacattggttttaagaaaaaagtagtcgataatacatacatttttataatcacgaacgcttccaaaaaaaattaaataacctgagtccttatcagtatagaactcaggctgcataggtagctttcttaagcctgtctatttgacaggggtcactccagcaacgatggggtagctttcttttttattagaaaacatagtttcttagtctcctatgttaagttaattttgattccatttgacgatgatactacttttggtctttcttccctttgttttttatgagaacttttatatttcaccatcaattcatgaatacttgctacctgtataatgcggatgtggtcagaattaacagcataacgaacaggtgtaatcaaaatgacagaagggaagataggtgcccgttcttctggttgccagtgcaaggatttccattcatctgaaaagaaaaattcttcatagaggttaaccttcgcttgcattttctgttctgaatactgatttcgttgtatttcaatccaaaaaggagatcctttaaaaatacaaaagagatctggttcaattcctccttttcgtccggtgggcttatcttcgacaatgacctgtttaggtgtgctatacgtacacatttgtttatagacatccaaaatagaaaggaaatgtaatatcttttgagagttctttttcattttggcatctacaggtaagtagaccgtaggagaatactgctgtgtacgttcaattagttttaatcgatataaacgtaccatcacactattgcatgcatttataggcgatttaagctgtttaaagaagaggtcaactaaagagtctcgatccacggctctaaattgattaataaacgctatgatgtctctatcacgctgagataaccggaaactcatcgctgctcctccttctctaataacccaaagatggactgtgataccacttctagttctggttcaggatctttcacgagcgttttataaggcgtaagtatttccttacaagctccttcatctaagaagtaggcttgaaattctttcactccatcaattttaattttcatacgccccctggctgcggcatcgatttcttctgcgccgatgactccggctacttttgcatttatcgcatctgcctgccttccagagatccgaacccgtaagtttgcttttagtgctgaattcaataaatcagcatcaggacgctgcatggcaataatcgtatgaacacctaacgcacgaccttgactcgcaaactgttggatcatctctacaagatccgtttctcttttcactatggacatttcatcaattaccacaacaatacgaggcaacttaaaaggtagcctgctgatatgagtgaccccatgctccaacaataaatcgcctcttcgatacatttcagctcgtaataaggcaaacggttttctcatatcctttgcctcaaaacaaagcgcatccacatgctcaatcccatgaaacagccccaaatctgctcgtttaagatccaccaacactaagcgcaagtcttgaggagaggcatattttacccatgttgtgaggatcacacgcatgagactgctttttcctgctccaatttcacccgatattagcaaagtttcgagatccgcaaagtcccacgaaatgaagtttccatagatttcttgaccaatacagacaggcagctccatcttctcaatgtgaggatggattgtttcataatcatatttaagcatggtaggtaagtctttgtgatgaacggtaatactaaagttttttaagctgccattcacttcaatattgctgcctaatacttgtcgtaaggcccatctttttttatttaaaagttcaggatcaatgccattcagtaatgaaaaagcataccgagtataggtgtgctgatgatcgatccgatggattttcggaaattgataggaggtacgatcaccacactttataacccgataaatctctgcggtacgaaatgctttaataagctttccacgcaattttaatttctcaaacatctagaatcctccttaaaacataaatgtcgcaaagaagtaaaataaggccccataaaaggtgacaggcaagataaagcgcattatctttgaaaactgatcgaccagatcaatcacaccccaccgttctaatattcgttcgatgatagcaattcctaagacaatacctcctatggtcaaaatagtggggtcaagcatggcgagtggactaaaaggtacaaaggaataagccttgaagggacgaggtctcttgagaggtggttttggggatggagaaaagatttttcgaaaaggaaacctttgtgtttttctcatgttgataccttctttcattcttttaatttttttgctttttacgtacctgttttttttttgctctccgcatccggtcgcccccttcgcctcttcggctcagctcccttacaggttccacaaaggtcttcactacgcgtatacagcttgtattaacgcggtagcgatagtgaactagatactgattaggcaacgaagtcgtgattctatagatactatgtagctactgcagtaagcttgcctgtccaatcgaaaaataaaaaagaacccttaccgcagtaagtaaggggtaggtggtgatgcaacatgtgcttggcttttatatgctgagggttggactagtggcttttgttttcagttataaagattgactagtctctatcctagtagaatttctctccttaacctgctttaacgtcgctactataagaaagctaacaatcactaataagagccatgaacttaccttccctaaatgaacgagactccatgcatcagtttggtttggatattcccaagccccaaagaacgttgcaatattttcagctagccatataaaaaatccaatgagaacaaaagaaagtgcgattggcatacggtagcgagttccattaacctcgtatgtgacccacgattgccaaaagacgataattacaagtccagataaccaccaacgaacgtcaatccagtaatggtggatgaaaaaattcaaataaatcgcagctgcaagaggtacaactaccaaaaacggtggccacttaaccaactcaaccttaaacctcctccatgcctgacaaagataactcgctacacttgcgtacatgaaaccactatacaaaggcactcctgaaattttgaaatatccttcctccggataagaccaagagcccatatgtactttgaaaagttcaagagcaagtccaataagatggaagactgtgataacctttagttcatcccgggtttcaagaccagaacgcaccatccaccactgcatcagaaggcagataatgagcagccagtcataccttggtaggaagggaagtggaatagcttgcgtaagagccagagaggcaaaaataacgacaggaaacaaacatgatagggcctgctcccaaccaaaacgaaccagttgttttagtgctctcatgacttgttcctccaaaggttctttctgtatatatgtaagtgctgcttggtatagtagctaaatagattttggattgtatacataagttcatcaccgaataactttcttttcctttccatattaaatattcctactttattaatcttgggtgtctttatcacttcggtattctaaaatatccccaggttggcactctaaggctttacaaattgcttctaaagttgaaaaccgaattgcctttgcctttccatttttcaaaatagaaaggttggccattgttattccaaccctttccgaaagttctgtaacactcattttccttttagccaacatcacatcaatattaattattattgccatgttaatcacctcagaccgttaagtcattttctgattttatatcaatcgcttgttgtaaaagtcttttaagaaccgcagcaaagactgcaattaccaatgaagcaaagatcgggaccattccaactattacgagacctggagcatcatctttctctgccgcaagaaaaacaaatggcatcattaccacatacaggccactaattgacattgcacagtattttattttccttaaagctattacggagatgttagaaaacgctttgttcttgtcaatatagattaaaagtcggaacgcctgatacaacgtgaaaaaatacgggatagctgaaagatacataatgcttacagcaggatatagtatgtaggaataatctggatttgctatattattagctaaataaaataggccaaatatgcctaaagtaagaactggagctcccataagaaaaagagctattttcaaaaatattgttgaacttcgtttcaaaataaagcacctcacttattaatttcaaatatgaatttaacatacaatttatcgttttacaataaattttttctgtttaatattatattattattgttatgagaatatacttttcgtttcttacaaatataaaaagcatttctcatgacaaagaaatgctctataaatgtaaatatttaatttatacctttatcaactaacctgcaccgataattgatgaagatcgacgttgtatgaatacagtaacactaacgaaatagatactaattaataaatgtagtgattatttcttagatacatgtagctacttcagtaaacttgctgtccattcaaaaaataaataagaaacttactgaacagccaaggatataaacattctctcgctttttaaaggaactatcttaatatcattattttgcattttatgaaaaatattacttaattttaactagttaaaagtattttgcccttaattttagtagtaagagctttttttacatctggaagatgatattgagcttggggttttgtgaatgttaactgtttcttatgaataaattgtataagctgataaaatgtttcgtgccatttacgtgtagagactttttggttccaatgacgtaaatgaaatatatttgtttttattttattattattcataatttctgcccaattgacaggtattcctgatagaagacctatagtcaaaaatattccatttggactgacacaataggctaagtttgtaccagaaggtccaccaatagagtcaattgctgctttggctccacgaccattcgtcaattccataaccgtatcgtagagtggggtcgtccctgtattaattacatatgaagcaccaagttgagttaattcctctgtgtagatattatttcgagttactgcaatcaaacgaaaccccaaaatacgggataattgagcaaaaacacgaccaatagaagagccgcaggcatttacaattaggtcatctcctggttttaacgctaatacttccgtacaaatcacccatgctgtgatagggttgatataaagctgtgcagctatgtaatcctctagataatctggaactataatggctagttcagctgatgtttttacaaactcctgccatgtaccttcaccccgtaagggtaatactcgtttgccaagaaaccatttagaaacagatggacctacttcttctacggtaccaactccttcatatcccggaatggcaggtaaagaaatccgatttgaataggcccctctaataggaattaaatccgatggattgattggtcgagttttcattcgtactagcacttcgccaactccaggatctttcacttgtttattttctatttgtaaaacttgttgaggttctccgaattcataaaatttaatgcttgttgctttcaagataggtatcctcctttagtttgttcatttatatagttatagtgtacaacctcttcatttctagttcttataacaactattacagatagcatgaaaggaatttcagttggggttttaattcatatgatttgggtgcatatctcgaattttattaaactataaacaaaaatatataatccataccgcgcaaaaataatatttaagtaacaagctgatttatttcggatcaaagccaatactaatgtctagcaccaaaaacaatgactgcatttaataaagaaatttagatatctgaggaagcgtatatatatacctttaactctatttatttttcaaccagacccatgacaaacggagtaaggtcactcaatttttctttatcgctaaggatcttcaaaaaaacattggagacatgttcaggtataggtgtttgactatctacagttgctgtcaaaaaataatataaaaaatcaaaatgattttctcttctcattgcatcaattaaatagtaagcataaagattattattcaatagcttccttcttaaaattattccaaaatcatacaactcattaacagttgtattcacaatctctgcctccttctaagctttatacgggtaaaaactgaatttcacataagcttgcttggataagatcataaacataattgatgcatctactatatatattgaaagaggtttttaacagcaatagacgacctattcattcggattagaaacgtgaggtcgcctacattattttcatattcatttttttatcctttcagcttactttatcaatagctttattcctctatattttcatcttctaactgccttggactctcatcatgacattgattaaataaataagtaaggtacgaatgcagttcaaatcggtccttttgaataaaggcagaccatatttgtttgtcttcgcccattctttctcctccttttttatttcatttctttatctttacggttttctagctagtaatcttttgcacgtacagagtgaccatttgtaaaaaaatgtagaacactttctactaaattgaaatcaataaatatcttcaatgccagataaattaataaaaagaatattttgtttttcatcttttaaagacagggtctgttcatgaagattaagattataaacacgacctttacacgtttgtagtgacccattttcataataatgaaccgtaactgccccatttttgattagctttttcaaaaacatagattaaccctccttttaacaaatgaattgcaattagcaaaaatctaaaaagatagatcttggattgccggattaactatttgatactctgtttctaactcatgtaaggttaattcataaagctgtttgtttccttttttatagattcctaaatggattaaagaatctgtaatcgagttttttctacgttgtatatcagggtagatttgttcactcattattccaccgcctaatttcagaatggtctttggtatgattgtcgaactattttaattcattatacagctcgctagttacaagaaaatgaaaataaagtaaaactgatgtaataaataagtaaattcgattagataagtgtgtatatgtgtcctatctatttactttaaagtcaatgtttatcgcctcaacccatagtaaaaaaatgtccctatgagtttcacttttaagaagttcctttccacaattcttggatttttctctcaagcgattctaaaacacaaaagactgtattcattattcactgtaataactccccataaaaactagtattaggtatattatggtatccttttttgattaatgaaatactttctacaaaacttcctttaaacttacataaaatcacaaagtaagactaaatactctcgcagtaggtgatgagtagatgattatggagtatgtactcttttttatatcttgggtattggactagtcacttatatttttcacggaacggaatggaagagaggggaagagaaatcttatccacccaacataacaatttagagtaacccaccattgctatgttagatactaacgtgatgtttctcctttacaacgaagggtatttaagaaaaaacatcttataaatcatttaactaaatataaaattgaaagacctgattagcttgactaaattgttttctgctcgcatcggtcatttatatttcctgcgatcattcttttaataacttttttatttatcttctttctatgagaaaaagaaatagatataaacgaagtagagtaaaaagagacattaagaattatctataaataaaccctatcgtcagtattaatgacaggggaaataagggttccagacggataggttcactgagtcgccctcaaccttttcaaagctgagacgaaattagcagtgcataaagcgtggaaccttccagatccgaagataaatgtttatgcgtatattctaaagtttttagtaaacggctcagtccttaaacccgagatttcaaatttgctattagatcatgatttaacatataaaaagtaatttctaatataaacacccaaagaaatcttacatattgtataaggtttctttgggcgtttattcaaattgtttctatacattcttataattgagcaagttcttcagataacttttttgatttagcctttagttgttctttttgaccttccaaatccgcaactgcagtcaaagcttctggattctgaggttcttctttaagttgctttagcatagctataagagactctgagacttttatcaaatttttgttcacttcatcttgcttttttaaattaataatttcacattttttcttttcgatattattcattagcctacttcctttctttcaatatggaactgaaaattaactccttaatcttttaaaagctgataacaaatgtgacaaataaaccgatttaacgatgtaatatgtgcaaacgatggtcataatctaatcttactaaagggaatgtaatcaaaggttaatgaaagagaacctacttagtaggtcctctttcattaacctgcttttgttgcaattactagtacacgtccctgatctaattccctttcatattgctgagcttctacatctgataatcctaaagagtggattttagaacgtaattcatctccacgggatcggaaaacgttggccattaaatcgaatgctccttgttctgaaacaccgacatcatttgtctccaatgcttccgttaaatctttagaacgatttttatcatgagctaataaatatacttcgtctcttgtatatcctcgatttagaaattgttcaattacttcttttgcttgaactccgttttctactactcttacatttttcataaaacaacctccttttatagttaaataatatgtacccatttctaagaaataaaaatcatttttatactcaataataaattttaaaaatcttgctgcaagttcttccattctatgtttcaggtcatctattaaattacttccctctctttaaaatctaaagctgtagggattaaaacttgggattacgttttggaagatgatgcacgggaatgaaatgaaataggacagctattaaataaaggaatgcttcactgtttatataaaggatgaaggtgtagaagagtatctgttaaaggctgtatacaatatgggggctgatgaagtttggaagaattagtagtaagttaacctaaaacgttgcctgtaatgaagggctatttacctgattagtaaaaggaatttataaggatactcattacgtgaaatttcatgtgaaaaggtctgtatcaaaatagatacagaccttttttacaatatttatggaagtctttcttaaaggagtctaataaataagcaataagcttttatttttataattcatgagataataaaatatatactattgaggtgaaaattgatatgtataacaagatttaagtagcatttgatggctctaaaccttctattcatgctcttcaacaagacaaaagaaatgatactgaattaggcaatgaatttcaagttggaaacacgaattcacagagccagaaaaagagtggacgtcaaataaataaagagtaaatcccattcttcaaagataataagaagccttagtttaaatttataatctgaactaaggcttcttattatactctgtttaagataggtggtatttcattgggatcaactatcacttctataactgaagggatagttttatattccaacgtttgtctaatagcatcctctatttcacttttatttctacacctataagcaatagctcctaatgattctgcaaacttcttaatattagttttttctttatacttcgctccaaccgagcgatttaaccattgtttcattcctttatcaaccatatctaagccaccattattaaatacaataaatattactgcaatgccttcatttacagctgttgcaatttcggtaccgtgcatgagggtacatccatcaccagtgaggcatacaataggtttatgcggtgaagctattttagcacctattgcataaccgatagcatgtcccatagtcccaaacacatcatcaaaaaagaaagtgccaggctcgtagatatcgtagtgcttaatagcaaaaaaagtatgacttccatcgtccccaaataatattgtgtcatttggtaaatgtctacgaagctctttaattgcactagctgctgatatataatgtgaactttcacttagctcttcagtttgatttttttcattcccttgttcttgggcaagtaaattaattggtgctaaggaagctgaatccatgtcattcactttctttttgagttcttctaagtttctttttgcatctccttggataactagggttggaactgaaattgatttccctgaaaaggtgatgtctatatcaaattgaataattttcttaggcttataactctctttgaatcctgctaaagacatatcgcttaatttacttccaattacaatcatgagatctatatgagattgcaaatacttcgtcgctctttctgtaccacctaagccaaatgcacctaaagataaagaatgattagcagaaaaagtaccttttccaccaggagttgtaataaccggaatcccccatttttcagcaagccattttacttcctcataagctttagaaatctgtacaccttttcctaaaaataatattggattttctgcttgatttaattgatggattacgttctccaattgtgttgataccacaggaacttctctcggtaattcaaatttgaaaggattaatttcttctactaacacttcaaagggaatagaaagatggaccggacctttaacccccacacatgctttttcaatagcatgtttaaaatataattcaaactgttctttacgctcaactcgtgcactaaataacgttacgggctcaaacattttcactaaatctgtaccaaacattgaggaatcttgccctaaagcttttcctgtattttttatggacggatggcctgtaataaacaaaacaggaagatgataagctttagcctgcccagcagatgtcaaaagatttgttcctccaggaccagaggttcctattgcaactccaatagtatcttttatcaatgaatagcctgatgctgcaaaacctgctccattttcatgtctagtaactataaattctagttcgttatcctctatttcagttaatataggaacgataggtttacctggaatcccaaagatgtgagtaactccccattctttaaaatgatcaattaataaagaaactactgttttcatgttagtcatataccttcctgttgagagtaagctggcaaataaagcgtaaaagttgaacccttatcttttatagagttaacccgaatttttcctccatgggattcaataatttgataagaaatatgtaagccaagccctattcctctttcttttgtagaaaagaagggcttagatatgctttctaactcttttgcggtcattccaaccccattatcttgaaccacaatttttatttgttctgtttcttcgttaaaatctagagatactgttatttctccaccctcttgcattgcatcgatagcattttgaagtagattaatcagcacttgtttaatttgtgattcatccacttcagtttttaacgaatttttcttattttcatatttaatttcaatattatgtaataaagcatgactttttacaagggaaactgtattttttattaatacatcaatatcacatgattttcgtttaaataacgtaggcttccctagtgaagcaaattgattagttaaatcttttattctttccaattctttagatataatgttcaaatatttttcttgagtattgaggtctatatctggattttgtaaaagttgaattaatccaataatagcggttagaggatttttaatttcatgtgcaaagccagttcccagtatccctagggtagatagcttttccgatgcaataacttgctcctgtagtttataaaattcactcatatctctaaattgtagaaaagccccatttaacttttgataactatcaaataaaggtaagacatctaccaggcaccttattaagttttctttatgttcattatctatttcaatttcgatatttttaagaggttttttagtttggagaacagagtcaatatatttctcaactatctccacttgtttgttttcaaaataacctgtgaaattctcttgggcctcaaataaattctttgcagcctcattaaaatttcttattttcccttttgtatctgtaatcaaaataccatcttgagttgaatgcataagtatttgattcaataaatctaacttgtaattttgttcttggagctttaattcgcgttcaattgaatcaatagctgaagataaaagccctaaatgtaaagagctagcataatcaatagtcgtcattaatgagatagtaccacttaatacttgagaaggagaaaaataaaaaggtgcagaaaaacatgctgcgctatgtagtacttcttgaaaatggtttttaccaataatctcaacaggtttttttaactgaagggctaatgaaatagaattagttccaacatctctctcatcaaatcgtaccccaggtgttattcctaggctatcaaccatttgttgaatagttttatctccatacatgtctaggataaatccattttcattagaaactaccactaatgtagggattccttttgaatattctaaaattttctccatgaaataccttgttacttggagaatactttcatatttagaattttgtcgttgtaattcttttcttattaaacacactttgggaattggtatatctttagggtttaaatgatataatgtttcacatctttcatgtgattgtattatatacttttctgtagtttccaaagctgatgcctcccaaatttatatatccgaatacacttcttataaagtacagttttaaacattaatcgactctctcacgagatattatattactttatgactagtttgatatctagctatatattagtcaatggaatttatcattttttgataaatgaaaattttcttatcgagttcttgacttattttaaggatgtctccatcacaatattcgtgattgtcctttgctaagctatagatgattttttgtaaagttttaatctccttttccagctgagataggttcattgaggttcgtcatcctccaagacagtttattttaactaccttataataccatttattagagaattaataattaattttttatattaatataaaactaattattattaagaaacactcttcttcaaccttctaattagctaataattaagaataattatcctcagcttcttctgtaatcatttagcttgctttgaatattcattacacttaaatttcacacatttatttgaagaacctgcttcttttgtgaccgtcaagacttcgtggctctttctcacttttggtgaaggtaaacgtcgctatatgtcaaagacatgcattattttttcagaaaaacaactctacctataataatggtatgagcactcgttttttcaacagctcatcacttgnnnnnnnnnnnnnnnnnnnnnnnnnnnnnnnnnnnnnnnnnnnnnnnnnnnnnnnnnnnnnnnnnnnnnnnnnnnnnnnnnnnnnnnnnnnnnnnnnnnnatggtatgctccccttatagtagacaagtaaaagaaagcaacctattctgtctactatggaggggatttttttatggggaaaaagaagagaacatttgacattggttttaagaaaaaagtagtcgatttgtatcttgaggggcgactcggctgtaaagcagttgggaaagaatttgggattaatcatacaacggttttacgttgggttcgacattatgaagccgaaggcctgaaaggccttgaggaaaagcgaggaaagtcgaaagagcctaataaagagaaatctgtctctcatttggaaagttcagagactaaaatcaagcgattggaagctgagaatgaaatgctaaaaaagctcttacagatgtaaaagggggaatgggggcagtatcaacctataaaaaatttaaagtcattaacgaaatggtaaaggcagggaaaaaatttgcgatttgtctattatgtgagatcgcagaagtatcaagaagtggctattataagtggttaaagcgacagatctctccttctgaaaaacaacgtgaagatgaagaacttaaacaaaaaataaagagatgtcatcagaaattcagagggatttatggatatagaagaatacaaatatggttaaaggcagtgtatgacttacatgtaaaccacaagcgtatacaacgtttgatgagagagatgaagattcaagcagtgatcaggaagaagcgtcgctattacggaagaaaagaagcctttgttatgtcagataaccatctcaatagagagtttcaggcttcacagcctaatgaaaaatgggtcacagacattacttatttacttttcaatggacagactttatatttatctgccattaaagatttatacaacaatgaaattgttgcgtatgaaataagtcgaagaaatgatcttaaattggtcatagatacgctagagaaagcaataaaacaccgaaatgtaaaaggcatcctcttacatagtgatcaaggaatccaatatacatcccgtacttatcatcaattactagagaaataccaaataaaagtgagtatgtctaggaaagggaactgttgggataatgcttgtatagagagtttctttagccattttaaatcagagtgttttcaccttcatactttccaaacagccagtgaagtgaaggatgcagtccaccaatacatacatttttataatcacgaacgcttccaaaaaaaattaaataacctgagtccttatcagtatagaactcaggctgcataggtagctttcttaagcctgtctatttgacaggggtcactccaaatacatacatttttataatcacgaacgcttccaaaaaaaattaaataacctgagtccttatcagtatagaactcaggctgcataggtagctttcttaagcctgtctatttgacaggggtcactccataactctaaggtagttttttcatttccaggctgtatatgttatacaattatagttaacataatcgctctttccagaacacatcataaaaacgagcccttaatactcaaggacccgttcgcctactcgctttttcatttatttgatacattattgatctaccagcattttgaacactattcagactagaacttttacataaaaaataaactttttatacccaaagcgagctcgtaccttctttttcaagatgcagcacgttcacttctgttcctttatcatatccatgctctcctcctggaagaacaatcagcgcgtttgctgcagctaatgacgaaatagcgcctgacttgtccatgccaacaggcgtcacaacaagctttccgccttcgtctgaaatctctcctcgcaccattcgcgtaaaagcattaggttctttaaaacgtccgtttaacaccgcttttgttttatgtaaatgaggcagtggtgaatgtaaaaaactgcgaacaatcggacgaacaaacagttcaaacccgacatagcaagcagaaggatttcctgatagtccaaacagcagctgtccgtttcgttctgcgactgttgtgacgcttcccggtcgcatcgcaattttgttaaacagcacgttcgcaccaagcttttcataaatagccggcaaataatcatagtcgccaacggataccccaccggttgtcagtaaaatatccacttcttcaagcgctttttctaccgcttcatagcagcggtcaaaatcgtcttcaagcttccctaaatatttcggaattcccccgcttcttacgatttgcgcaagtgccatataagaattgctgttgcggatttttcctggttctaacggctcgttcacatcaagcagttcacttcccgttgttaatacaccaaccacaggctgcttcaccacggcgacatccgcatagccaaacgtagctaaaaaagccgtgacgcccggattgattcgcgtccctttcgaaacaagcacgtctcctttttttgtttcttctccctttaacgcaatgtgctcccactttgaagctggcctgcttaacgccatatacgttttgccttctttttcatacgacttcgttacttcaagcatcacaaccgcatcacatgaatgaggcacttgcgctcctgtcataatgcgcaccgcttgaaacggctttacttcttcttcaaaaacagagccagcgccgatttcacctacaacttcgaactctacagaatgttcacttgagacttctacgcagtcttgcgctcgaaccgcaaagccgtcataaagcgatttattaaaatgaggaacgttttggtcggcgataatatcttctcctaaatagcgtccatagctttcggtgatcgatacgcgctcgatgctgccttttcttttatatgtcatgactttttcaattgcttcaggaattgaaataggtgttctgctttctaacatacattcttcacttcctttatgtctgttcactttttgcactatggtgtaaaatcatagcatatctcactatttctatcatacaacaaaatttactgaaaaaggatgaaaacaccgatgtcttcttttacacattttaatgatcaaggccgtgccaacatggtcgatattagcgaaaaatctattacgcgccgcgtcgcaacagctcgttcaagcatacttgttaacaaagaaattcacgaagccattgtagaacataaaattggaaaaggcgacgtccttgctgtcgcacaagtagcgggaatcatggcagcaaaacgcacgtctgacattattccgatgtgtcatcctcttttattaaaaggcgtaaacctttcatttgactgggatacaagtaatgatcagtaccgtttattaatagaagcaacggttaaaacggaaggctcaacgggcgttgaaatggaagctttaaccgctgcttctgcctgcgctctaaccgtttatgatatgtgcaaagccattgataaaggcatgattatcggcgaaacgtatctgcttgaaaaatctggcggcaaaaacggtgactataaacgcatggaatcataaaggaggtacataatgagcgtacacgaacataaatctaaagcaactcagcccgttcgctgcaaagtcattacggtatcagacacacgtacgaaagaaaccgataaaagcggcgcgctaatgatccagcttctgaaagaacacgacatgcagatcgcttcctatgaaattgtaaaagacgaccaaacgtcgattcaacaagccatacttgctggctgcagtgatgagaacattgacgttgttctcacaaacggcgggacgggcatcacaaaacgagacgtcaccattgaagccgttcaagcgctgattcataaagaaatcgttgggtttggcgagctgtttcgcatgctgagctacaccgaagatattggcagcgctgcgattatgagccgggcaattgccgggacgattaacgaaaaagccgttttttctacaccaggatcaagcggtgcggttcgtctagcgatgaccaagctgattttgcctgaacttcgccatgttgtgtgggaattaaaccgccagcgctgacaaaatgcctatgcacacgcataggcattttcattaatcatagtctttatgtacccactcatcttctggaatacctaaatcttctccagaaaaacgctcttctttaaacggatctcctctaagatgaaagccgttttgctcccaaaagccaggatgattttcatcaatagcttcaaagcctcgaagccatttaacacttttccaaaagtacaaatgcggaacaaccaatcgcagcggatatccgtgcttagctgtaagcggctctccgttaaaggaatgagcgagaagaatatcgtctctcagtaaatcttttacttcaatgtttgacgtatagtcattatctccatgcagcatgatgtatttactttttaactccacgccaactgcttttaaaaagtctgtaaacagcacgcccgtaaattcattatcaagccttgtccatctcgttacgcagtgaatatcacatttcaccgttatttgcggcatgtccaatatatcttgatacgaaagcgtcacttctttgtttactaatccaaacactcgaagcgtccactcctctaagttatactccggcacgtcgccttcatgtaaaatcggaaagcgctccgttactacctgacccggaggcactcgtccttcatactttggatcaatttccggtgttttcattcgtttaatacggtctgctttgttcaaattatcacctcattattttttgtacataaaaagcccttccttaaataaataaggaagagctttgtttcagcttcttccttatctctaagagcgatacactcttaaggatttggcaccattctgtcatagacagcggttgccgggtttcacagggccagtccctccacctctcttgataaggaaacaaattgtatttgttttatgtaataaagtcagtattaagctttttgtcataattgtcaatattatttttcttttccgccaaaaaactttaaaaacagatagggttataaggttttagtctactaaaataccatgtaaatcctttacccttctccatcaatcatcgtatacttcctggcaaagcgcttgtagtaaatttgctcatcctcttgtccatcgttaaaaacaagtcgattatgatcaatatctttttcttttaacacgtatcccttttcattcatcagttgaatatattcatctaaatgtccttttttcaccatataatgaagagcatcgtctgaatctgtagtccttgctacaccttgacttcccacttctaacttgaatacagctgttgctgtttgaacgggacgataatctccaaacactctttcccaatttaagagcagcagcgcgccgaagattatgataaatcctccagccgctacggtgagcacaaatcgttttgacactactttctctcctttacattctttttcttctatttaatacaacagatttccctaaacttgtttttacgccaagtcctagatacacagcagcaatatatacatttaacaaatacttgattttttgtatcatacttacaattattatctagttttttataaaacattagaaccctctctatattacgtttttttacctaataaaggaacagaaaccaatcttttcgcctatgataaatgaatcgttttttgctttttactttacctgacgtttacattctaaaagacgtgttacattatatatatcagttaccaactaaactaagactccttgactattctggcctacctgttcttttaggtagactgaggttgctaaatcgttatatataggaggaaaaaatcatgaaaatgaaacaacgaatatcaaaagcagcggcggctgcaacgattacaggaattgctgcgtttggatttgctcctgtcgctcagtttgatacaccagcacatgcagctacatctcaagaaacaaacagtcaaagtcaaacagctgtaaaaaacattaatgaaatttacaacgccgcagtaaaaggtgaggtgccacgcttaacggtagacttcaaaattggcaaaacactacgtcaagacgttcgcgatcagttcggtcccccgcctgaaggttcatcaaacaactttgactactatcatgcggaaatgggtcaccctggatacgcatttggctatgatcaaaataacgtcattaacgaaatccgctattttggtacaaatgtagagcgtcaaacaaatctaggctccatcacgcaagctaacttaaagaaagaattaggtcagccgaactttacaggcaaagtaaaaggtgatggtactactcaaacgaagtacacctatcatgccggcgcctatgatcttgaattcatttttgatgatagcaaaacgttaaatcacgttaatttagttaaaaaaccttaagtaatagaaaaagtagcagacagcctgctactttttttcatgaaataaaaccaatgctgaatccgctacgtgttcatagccaatctccatataaatcttgttagacgtaggatttgtcatatctgtgtataaacttgttgtttgaaatcctctgtctagcataagctgagaaagcgtggatacacagcttgaggcatagccttttttacgttcttcttgaggcgtgtatacaaagttaatcgtaatgttatgggccgttggacgcgtagcattggcaatggacacatacttgccgtttacttcccataaaaatagccgttctgctttaataaaagcttctcctgttttgacagcttgttcttttgatacagggtctccaatgacgcccataaactcccaaatccattctgtcacgagcggaaggtgttccaatcttgcttttaccagcactccctcagcgtccgcagctttttttactttgtctaaccgataaatgcgctgatccatttttaaagaagcttcttgattttttaaatctgctagtttttgagaaagatataaaaccatttgtctttctccaactaagcccggtatgtcgatttcttgtaatagctctgccgcttcgcttagttcatcctccgttagctgctgtatttgagacagtatgatttgcttaggatgggtttgcagcaacacaagcgcagcacggctgtcttttaaaataacacccataaaatttggtttgctgttttcctgcaagctgtgtaaaatgccgagcgctaagttatgaagaacttcattctttgataaaagcggctctacttggtttttaaattcctgcacttctctatatctatgtaactggatcattttctttctacctccgcaaatgctcttaccggaaacgttccaactccttttattttaggaggcacggcgtaaaataaaaaggacttcgccgttagttgatctaagtgacataagtgttcagcaattacaatgtccgctcctaacagcagcgtatgagctggtcttgtttttccttttgtatcatcaatattcatcgaatcaattccaacaagagcgggctgttgagacactaaataagctgccgcgctttctgttaagtatggatgattttctaaataatcgtctgtattccagtagcgatcccatcctgtatgaattaataccgctttgccttttacatctacatgttgaaaatgagattcatcaatcgcttttaaagtcgtgtcaactgaaacgactattccttctaacccggctgttttatcaatagccatttgagctaaatccgctccgtctttgtatctgtgaaacggcacgtcaatatacgtacctgtattcgtgaccatttcaattttaccgatttgaaattcagtgcctggttcataaagctttctagactcttctcggcttaaatagtcgcaaatgatcggtgccggcaagcctttatgtgtgataactccgtcttcaatgatgtggcttagatcaatatacgttctttttttcatacctccacccactttttcgatattcagtaaaaatattctaacataaaaaagctcttcctagtttcctagaaagagctttttttagagaacgttattaacttgataaacatacatcatacgtatgctttgtataaacaaatccttcaaaaataagacgggctgtacgcactactttgattccgttaacctgtccatcttttagatccacactggtttccataattcccattggatgagcaagtcgaacggtattaccttttaattgaaccatttctgacggaagcgtgccttttgtatagatagccgccgttgtacaaattgctcctgtaatcgcaagcgtttgatgcggtttttgcatcgacatcatgcggattaatacgtccatttgagaagcagctttttctctgccagtcccgtcgcgatggtccataggaggagaaataatcgtcatttttggaaccgctggtgatagtttagttgctttgtcttgaggtgcaagccccgctttttccgctgcaatggagcgaatttcttcaaatagcttcagctgtttgtccgtgtattcatgcggaagttctgctccctttaagccaatatccgctgctttaacaaatacaagcggatttcctacatcaacaattgatgcttttatcgtcccgatggatgtttgcagaagatcgatagcgttcccggttggaagcagttttccagtaacggctccttctccgttttcaaacgaaagataaatgggtgaacccgtgcctggcactccaggaatcatacaggatccttctgttttcactttcccgttttctacttctacttccgctacgattacttttttggtatttgtattatagatccgcactttagtcaccggttccacagcttgtacaagtccttgttcgattgcataaggtccgaccgctgaagagatattgccgcagtttcctttaaaatcaacgagagattcgctgatgctaacctgcgcaaacgtgtaatctacgtcagcttcttttaaatctgatttttttataatcgcgattttacttgtcagcgaattagctccgcctagtccatcaatttgacgttggtccggacttcccattatatctagcaaaaacggttcccaatcggatttgttcacaggcatttcttcatgattgataaaaacccctttacttgttccacctctcataaccgttacaggaatgcgcgtcatattaatcacctttctcccctactaacaaacgccgaggcgttcatcaaaccattttatttttttactatttagaaccggttcatttgccatttatcgtataatagaggtggtcataagtaaaatacataaaatttattgtctttttaaaaatttttttataatctaaatacaagggggaatcgggatggatcaaaaagattggatattaattaaaacgcttcacgaagaaaagaacattacgcgaacggctgaaaggctctacgtatcgcagccttctttaagctaccgccttaaaaatcttgaagaagaatttggcgtgtcgctttttttcaaaacgaaaaaaggaattgagtttacatctgaaggtgagcatcttgttcgctatgcggaaaatatgtggaagcagctgcaggaaacaaaagacagcatgcgtaatatgagcgaaaccgttacgggaacgcttcgcttaggagtatcgagtaactttgcacagcataagcttcctaaaattttaaagcagttctctcttcactacccaaatgtacagttcagcgtcaatacgggctggagtacgcaagttatgaatctattagactcttcgcgtgtgcacgttggtattttacgaggcaattacccgtggaacggagaaaaatcactgctgacgaaagaacggctctgcttaatttcgaaaaaagaaattgcgatcgatgatttgccgaacctgccttatattaactataaaaccgatacgtcactaaaagatctcattcaagactggtggcatgacaagttttcagagcctccgtttgtggcaatggaagttgaccggcaagaaacggccaaagaaatggtcaaaaatgatttaggctttgccattttacctgaaatttgccttcactccagcgacaacttatatacatacggactttcgtaccgagatgaatcacctttgcttcgaaacacgtggctcatgtatgatccttcttacttgaatctatcggtcgtgaaagcgtttattgactttttaaagctaagtgaaaaataaagccaaagttaaaaagtttgcgtcttggaaaaatctctcttttagaccaagcttttttctagactaccattataaaaattttttatgaactttctaaaaaaacctatatttcctttatttttaaaaatgtactaacatgaaaacaagaaacatcagcgggagtaaagagcggctttaaaaattcttaataatcaaactacgactcatacatggggatgagaaatgttattcacgtttttttactctaaaagaaaacgctttcagagaaaagagggaaaataaaggaggttgtttgaatgctagcactactaggttttacaatgattattgtctttacgtatctcattatgtcaaaaaggatgtctcctatcgtagctttaatggtcattccacttctttttgcggtgattggaggttttggcaaaggcgtcggagacatgatgctagaagggttaaaacaagtagctccgtcagctgcgatgctgctgttcgccatcttatatttcggggttatgattgatgccggactgtttgatccattaattaagcagctgttaaaaatcgtaaaaggcgatccgcttaaaatcgtcatcggaacggctcttctatcgcttttagttgcactagacggagacggtacaaccacttatatgattacggtttctgctcttcttccactttataaacgcctgaatatgagtccgttagtgttaacgacagttgcgatgctttctcttagtattatgagcagcatgacgccttggggaggcccggctactcgtgcgattgtcgcccttcacctcgatgcatctgagttctttattccacttcttccaacgttaattggcggagctttgtgggttgtctttacaggctatattcttggaaaaaaagagcgcagacgacttggtgctattgacatcgagcagtttgaattaaaaagctcgcttgcgtttgctgaagacgcatctttaacttctcaagaagatattacacagcctaaaaaaatctggattaacttagctttaaccattgcactcatggtcgtattggtttctggcatttggtctgtttctgttttatttatgattggttttgcgcttgctcttatgattaactatccaaaacttgaggatcaaaaagaacgtttaatggctcatgcaggcaacgcactaactgttgcagcccttgtttttgcagccggtatttttacaggaatactatccggcactaaaatggttgacgaaatggcaagcctgttaattcatttagttcctgattcactcggttcgtttttaccgacaatcgttgctttaacaagcatgccgtttacattcgtgatgagtaacgacgcttattacttcggtgttttaccaatattcgctgaaacagctgcttcttacggaattgatccgatggaaattgcgcgagcttcagtgctcggacaacctgttcatctgttaagtccactcgttgcgtctactttcttacttgtaggtatggtaggtgttgatcttggtgaacatcagcgctttgcatttaaatgggccattttaacatctcttgttctaattgtccttgctattgtcacaggggcacttacgctattttaataggaataaaagccgttatggctctttattaataaattgataaatgataggtggaggtacttctaaaatgtatgtaattacgtgttatgtaagaaaaggtgaaatgagaatgtacgagtttgatagcaaagaagaagccctttcccagctcaaaaacctgaaaggctgcaccattctttcagaagttgtttattttaatgattcatcggttattccggtagctatttaattatgcaccactcaaccctataggtacaaacttgataagcttcctttcgctcaaaaggaagcttcttttttatgttcttctgagatttcggtcccttttctctcctcaacgttttgttacgtctggttcgttttgtttccttgcttcaatcatatcaataatttgatttgtatgtggagttagcacagcgcatttttgatagaaagctccgtctacaacgagcagctcttcatccatcccgcaaaacttgcagcggagctcttgtggtcctgcgtaagaggtgtgataaacactatcattaaagatggtgtaaaaagtatctctttgctgggcatcgtaaaagctatattgctggttagcgtcatcacggtagttaactccatagttccggtcgaattcttcttgagtaaatctatcctgtaaaagttcattttgtactagttcccttaagcaatcctctatttcctcaccgttaaatgaacaatcatgtacgtaaacttctggttcttcgctattgttctcttttaccatcacttcactgccgcaaaccttacagggatgtttgggactctgttgatcaaagtaagagagcgtttggaccttttccactgctatttcatcgctcacctttttaaacttaatcatcacattttctgtttgactgacgttttcgttatacaacatcacttcatattcatctatattctttccgttttcttttcgactcatatgctccattacttcatacgaagaaatagtaaaaaactctttaaaattcaccactaacatgcatccttccaaaaaatttacgttctctatgtacctgctctatactaccattttttcaaaggctcgcaccactaaacgaacttcttttaggttcgcatatccttttcttatctggcatacataacactaacccttttataaggaggatttcatgaatatgtatataatcatcagcattggcgttgttgccagcgcatttttatttcagaaatatcgaaagcaagttgttgaaatatatacaatcagggaatttattcacgctaaaaacggcgcgggcgctacaagttccatgtggcttgaaaagttttttaaagaaccttacgctaccggaccaaactatgaaaaaacagaggatgacgttagcgaggatggagatggggatggcggagaataaataaaagaaaaaaacctgttgtgagaacaggtttttcttattaatcatcgcttcctaaaataccgaaaaagcgaagcaagttgatgaatagattaataaaatctaaataaagagatagtgccagcagtggaacaagctcttccgtgatttcaccgtgcttcattttattaaaatcatacagcacgtaaagtgaaaaaacgatggtaccaatcactgagaatgccatgagtccaggcgttgttaagggactaaacagcgagaaaatgctgatacagactagtgctaacagcgctactaataaaaagctgcctaaaaaccctaaatcttttttcgtttttgccccaatcacacccatcacagtaaaaataacgaacgtgcttccaaacgcataaagcacaacttgcgcccccgctactgatgcatagtagctaacaatcggaaacagcgtgatgcctgatataaatgaaaacgcatatgtaaaaccgtatcctacgctttttttctttcgtaacataaatgctgcaaccagcatcacaagttcagcaatcgctaacggaataaaataagccggcggcacatattgacctacgtataagccaactgttgaaataaataacgaaaaaataaatgttactaatactttttgaaacagagaccgctgctctactccaatcacttcttgcatgtgtaaaaccttctttctgaaatctgttatattttatataatacctacctttttaagaaaaataaagataatactaaggtcttttttcttatttctatagaaagaaagcatagacgctgccgtctatgcttccttggtgtctctttattttggcaacagaataccgtcaataattccgtaagtctttgcttcttcagcactcataaaataatctcgttccgtatcgtttgccactttttcaaccggctgtcccgttcgtgttgatatgatttcattaatatgctgcttcaattttaaaattcgccgagcgctaatttcaatttcagtcgcctgccctctagcccctcctagcggctgatgaatcataacttcactatttggaagtgcatagcgctttccttttgctcctgctaggagaagcaatgcgccaaaagaagcggccatgcccgtgcaaatcgtttgaacatccggctcgatatactgcatcgtatcataaatcgcaaaccctgctgaagtggaacctccggggctgttaatataaagtgaaatatcttttttaggatcatctgtcgcaagaaacagcagctgcgcaaccacgctgttggcaatatgatcattgatttcatcaccaattaaaataattcggtcttttaacagcctcgaataaatatcatacgaacgttcaccgcggttgctttgttcaattacatatggaatcgtactcatatatatcctccttatcacacgtaatatggctatgcagccatgcagagagtgcacttcggagtatacgttggtttttgaatgacgctttttaaggaaggcaaagcatgaatcaaaagtgctgggtcctgcgcttctaacgttttataaaacagttctgacagctcattacgctctttttcatcccaaaaagaatctgtagaaaacggctcaccgtctttttctaaccgctgcttagcacgatgtaaattgctttttaccgctgtttctgacgtttgtaaaatcaacgctatttcttttagctgatagccaaagccttcttttaagaaaaagataactgcttgctttggcgtaaactgactaaggagtagctcgaccgagtgtcctttcatatcaaacgcccgcttgccgtcttgttggtccaaaccttcttctgcggctattacttcacgctttcgttttctcagcagatcaatccagtggtgatacgcaattttatttaacagcgcggaagacagcttgtgctcttcacctttatatcgctgagcttttaaaaacgtttcttgggcaatatcgtctccgtcccacgcattttgcgctaaaaagcggcagtactgctgcaattttgggtaatgctcgttccagcatgcatcgtcaaagctttttgtttgtgtttcgattttttttgaatgtgacatgattttcactccttttgcactctctatttactaaacgattaaaggaagttcaaaagatacggggaatcaaacttttttacacattatacgcttaagcagctatttttttgtattataagaagatacttttatctgaggagtgtaaaataatatgcgaagaagaaaactatacggcaagaagaaaacgaacaaacttcactataaagacttaacctgtgaacaccctcagcctgctttgcctatgagctatacaagtgaagctcctttttactattatgacgcgtcagacgatgaaagacaaaacgactttgaactatattcagagatttgtatcatgaatcaagaacattttttcgtaagaggctgtgttgaaattcctgtttttaatgaagaagaatttttcacttggaacatatgggtttctttaagcgaagaaaatttccgccgaatgatagatgtatgggaaagtgacaaaaaagaaaaggaaccgccttatttcggctggttttcagtttcaattccaggctatcccgaaacgttaaatttaaaaacaaatgtgcatacaagatctgttggaacaagaccgctcatcgagttagagccaaccgatcaccctttagccgtcgagcagcgggaagggataacgctagagcgaatcaaagacatacaaaaacaattgactacctattaaaaaaccaagacagccccagactgtcttggtttttacctttatggcatgcgctttgctccgtagtatttaggcgcccagtagctgtctactttatagtttgtaattttcacgccctcagatgtggacacgtgaacgacatagtcatttccaatataaatagatggaataagtgaacttccttcaaaaaagacgagatctcccggcttcaagtcagattgtgaaatggtttctcctgcattccactgctgactcgcatagcgcggaatgtcttttccagctgcttctttataaatgtattgaacaaaaccagccgtatcaaagcctgtagaaggacttgtcccaccttgtgcataaggtacttctcctacatatttaagagattcggtcacaaatgggttgtcttttgatagcgataagtcatcgtagcgccttgctcctgcgtacttagacgtccagtagctgcttgtcaggtaatccatcgtcacattttcgctgcgcttggcatgaataaactgattgccgcctgcgtagataccgacgtgtgaaatcccttcacgatacgtgtctttaaaaaagataacgtctcctgcctttaaatctgcgcgagcaacttcttctccaacttgccactgctgatcggttgatctcggaaggtagacgtccgatgcgtgttgaaatacatatgcaacaaatgcggaacaatcaaaaccgtccgttggcgactcgcctccaaatacatatggtgtgccgagatgttttagcgcttctgcaataacttcattatcttttgcaatttccggtgctcctgtaattcgctttgctttggcaaaatgtgatgaccaataggcgctgcttgaaatgtttttcaccacgactttttcgtctgaagaagatgcataaatcatctcatcgcctccgatataaatagcggctacgttcacttcaccgttttcattggtgtcaaaaaacaatacatcgcctgcctgcagctcacttttgtcaacatctgttccaagctctgattgttctttcagggagcgaggaagcgttgtatcaagcgcttgcttaaacacatattgaacaaagccagagctgtcaaacccttcgcttagcgtttcgcctccggatgtataatcggctccttcatacgtttttgctttatcagcaatcacgttttcatctgtagcagcctgtacttgcacagctttttctgcaggaaaagcgccttcataaaaagtggcaagactaagccctaacgctgtgaccataagaggtttcattactttcatgtttgttctcctttgttttttatttcatccaagaagttttatatgtaaatcgttcctctgttaaagtatggtgcagatggataggaattggctagtaccttttgacttaaatatgcttcccttccaaagtcctgtaaaaaatccagaaaaaaactcggcgcacattacgccgagcttttttatttcatgcccacctggatatttgctgctttttgtttttgacgtaaatttgcaatccacttgtagtaaagtgtaatcaaaagaacaaaaataccaagtgcaaagtacagttttgaatatcctaaagcacctgctgcaattcctaatacaaatgaaccaaccgcaataccgctatcataaaacgtaaagaatgtagcagttgcatatgcgcttcggtgagcaggcgccgcttgaatcgcaagcgtttggaagctaggaagcagcgttccgtagcctagacctactaacgcacctgaaaacagcagcatccaagaagaatgtgtaaggcttaaactaaatagaccaatcgcaaagacaatacacgatggaataatcacaatgtttgggccagatttatcaaataatcttcctgtaaacggtcgtgagatcagcatcgcagctgcgaatacgacaaagaaaaagcttgctgttttaatcaatccaagcgactgtgcgtacacagaaataaaagaaataatgcttgcatacgaaaaagaaacgagaatacctacagatgaaatcggcatggatttcttttcaaacaaatcgctcagtgaaaatgatttcttcactgacggagcagcgttttcttgaagatttttgaccatcattccgcacagccagccaacgagcataatcacgccaaatacaaggaaaataatattgtatgccatgtattgatgaagcgttagtgctaaaaacggccctgcaacaacggctaagttcattgacattccgaagtagccaagcccttctcctcgtcgtttagcgggaactaaatccgctgcaatcgctccggtgacagttgttgctaagctgaatgaaatcccttgaaagaagcgcagtaataaaagcacgttaaaatcgtggatgaacatatataagaaggaagaaagcgcaaaaatgagggtactaaatacaagcgtttttttctttccaatgttttcaatgactttccctgaaaatggtctaacaataatcgcagataataaaaagatggtaacaacaagccctgcctgcgtactcgtgccttctaaggcgtctaatacataaatcggcaacagcgttagcaatgcataaaacacgacaaaaataaaaaagttggtaatcgcaatgctgataaagcttttagtccagattggctcctgctggtttgtcattcatttcacccttttctgtagatttacaaattttctttaataacgagataagctgatcttgttcgctgtcggataaagcaatcagcaaattttcttctaaacgttcaatttcttgctgaatttccggaagctttttcttcgcttgaggagataaataaacgatgcgctctcgtttatcactgcctgcttttcgaacgatccatccgcttttttcaagccttgttaacgtgcgggtaaccgttggcgcttcgacatttaaatactgccaaatctccgtttgcgtcatcgagccgaatcgctttaaacaaaataaaattgaatactgtgagctgtatagcccgtacgcttttaacacttcatttacttctttaatagacaatctcgacttttgatgaagctcatgaaacaccaagttattcacttttccccacctcacctttcattttatttacctaggtaactaattgttcttttattagtatatgtgctgctgcttgatgtgtaaaggtggctaaaaagggcgaaaatcagctgttttctcttactttctactaatgatttacgctttcacttctgttttcttattcttttgtatcacgaaactttttgtatatatttacatgcacctgcaaactctgttaaagaagacgaaacaatatgcgggaggctggtatatgttttcactgcgcggcgatgctcataaagtctaccttaaactgaaaaaagcagctcatcaaaaccaaaacgcagaagaaattgatgaattagcggaaatggaagaaatccggcagctttaccttacgctcgaaagcgctactttgcgaaaagtgtattaccgaatgaccaaagaaaaaaacggctccggcgtcattcccatccttgtttctgctttgccttggctcttttttttattttcgcagcggctgcagcaatttttatttaaagacggcagctggctttggattatttttgtggtgctgtacgtttttatgctcattccaagcgtgtttcttcattttcgtgaacaatcgtgggcttctgttcatattgaaattattcaagacattttaaaagaccgtgaaaaagagccgaaacccctttgaggctcggctgttttttgcctattatgaaatagcttgtctgctttctacgtctcgacctaactttcttttgatacgctgcagcgcgttgtcaattgacttgacgtgtgtatttaattctttcgaaatttcagcgtatgaatggccgtccatatacagcgtcaatgcttttctttccaattcactaagtgtttccgcaattttcaactcgcggtcttccactttttcttgatgaatcagcaccgcttccggattagcaatttgatcgccaggaatcatatccatcagcgtataatttgattcttcatcatacagaggcttgtccaatgaaatgtacgaatttaacggaccgtgcttttgacgagtagccgttttaattgccgtaatgatttgtcttgtgatacataactccgcaaaccctttaaaagatgttagcttatcttcattaaagtcgcgaattgctttgtacagtccaatcattccttcttgaacaatatcttctttttcagcaccaatcaaaaagtattttcttgctttacccctcacaagattttgatacttgttgattaaatactccaatgatttttcatctccgctgtgaaccatttcaaccaaaacatgatcttctaacatagcataattttgaactttttcaattacgatgcctacgctcactcatatccccccgttacacttagttgagttttgatgtgttctaaactgatgcatgatctacttgttacgacgctactgcaatacggtccagaaacgtaaaaagcgtacaggtaaactgtcgctttcctctctcactttatgctcccctgcatctttctataatctattataaagaagtataactgataaaaatcaaaaaggttgtcgaaatatgaaagtgtttgcaaaaaaaatcaatttttatagaaaattcacacaaatcactttattatttcatatagtgacagcaatctgtcaaaaaagcaataaaaaaataattccatatgaaataaacttactcaagcagagtaagtcgaagttgcagatgatactgcgcatataggattagttgccttccggcttatcagcattttttgttcccttgcttttataaggctttgcatttttcttcttttttgcactcgcctgccagcggttccacccttttttaccggtgcctcgccccgtgccgcctttaccttttgctttactcatacgtattcctccgttacctgcgtgtttgttacaataaaaaaagaccccgtccaaagtcggagtcttttttggattgcataaaattatgcttttacaacgttagcagcttgtgcaccgcgttgaccttgctcgatgtcgaaagtcactttttgaccttcgtctaaagatttgaatccgtcgccttgaattgcgctgaaatgtacgaatacatcttctccgccttcaatttcgatgaaaccgaaacctttttctgcattaaaccattttactgtaccttcagtcatactatttcctccagtggtggaatttctccacgcatatattactacccttgctcaatcgtactatttccagataaaaatttctattgaagaatatttctcttctttcaatttcataccgaacaaaaataattaaccttagtgtaacatatcaatttagaaatagcaagtttctgttctaagacaggcttcatcctattatgtatctgttaaaagcctacggggcagctttgaggctaccaacatttctggattgtgatgcggcagaaggtttttatattgagctaaacttatcgtctgcacaaatgcacaaaaaatcttttatttcatcaatttgttttctgctcattccaaagccttgtgatggaaacgttcttcttttcgagatcgatttgatatatatctggatttgttaaacgcgaccattcattaaacccaaacttcggatcaaaatatctgaggattaacgtcatcatattgccgtgcgtaacaaacagagtcgttttctgtttttcattcattacttctttaaacagctctaaagcacgtaccgtggcttctttcgtcgattctcctccgtctaccttgaagtctatgtcatcaaaagttcttttcaatacttctatccagttgaaaagaggctgtccgcttaaacgcctttcttctagccttgtatctatatgaagagggagaccagtatcttttgcataaggttcaattgtttgaacggctcgtttgtacggacttgaaataattttatcaatgggataactcagcttgttcaaataacctattaactgctgggcctgctgtatgccttgttccgtcaatgatgcttttgcttcttgcccttctgcttcacaatgcctaactaataacaaagttttcattcatcttccctccacgcacagaaaaatagccattaattacaaaataagataataatagtatataatgatacgtgatttatagctaaggaggaaccacatgattcatgaacgatcacttttaataaaaggactcacctttttactagctgtttttattttaaacatcccttttcctaactcaacgccgctcagtcattctatcttttcttttttaggtcttcccctctatggagatgaagaaacaaggacgggaattcaatatgctagcaatgcgtggggaatcatacttttacttggtctttttgccctttacaaaagtttaaatcgtcatcgtttaaaactaacgatgttagctgcatttattgtcatatcaggtcctggtcatatggttgaagcgatgcaaaagaccgtattaccaggtatgtatgccgtttcttacgatgtggaaaacagcaattgtacatacaagagaaataaaaaagaaaccgtattaacgggcacctgtgacctttcatttgaaaatcacagctcaaaacctattacgtttgaagtagcactggatgaacgctcctattttaaagaagattccccttttttacttatgatgaataagcctaggcttcatactgttacgttggaaccaaagacgtatcaaactgtcgaaatcacttcatctgtcaaagcagcagatttcccttctaaagtctttatgagtgaagtaaacggttttcatgtaaacatttatcaaaacgggaaaaagcgttatttataagcatagaaaaagcccttatagggctttttaaatgagtgaattaccagccaaagcctccgccgtagcagctgcagccgatgatcactaataaaataaataatacaactaataaagcaaaaccagatccatgaccatatccagcgtttccagacatacgaacacttccttttctttagttactctttcctcaagaaaaatgcagcttgcatttcgcttgagttggattatcttatgcctgaacacgcccttttgactctggttttttctttttttctttttccttcttgccatgcacctcatcaataaaagaagaaaacggcctaagaaaagcgctgacttcgcttcttctcctctgttcaaaagagattaaatcaatccaatctaaagacgaacaaataagatgcatgagctgaaacctacgttcaccattccaataaaaaatccgaacgcgttacattcatcgttcggatcttcttcttaaactaaaatgcttttcagcctctcttacaaaatcatttatttcactagcttacgtctttcggaagaccgtacttccgtacgcttaccgatacctaatacatagtagctcagcacaacaatagctaaaaagataatgcctacaatcagcgatatgcgcgtttcatcattaaaccacatgcctacaagcaccataagtaaaaacgcgatggttacgtagttcgtcacaggagcaaaaggcattttaaacggatgttggtccatcgccgctccttttgcttttcgaaaacgaatttgactgataagaattacaaaccacggaatcatccctggaagcacgctcgcactgtacacgtacacgaaaacgtttggcggtgcaatataatttaagacaacgcccgccgctaagccgatcatcaccgcaacggtactataaataggcacaccgtttcgagaaacctttgtaaaaaaggccggagcctgaccgtttacacctagcgtgtaaagcatacgtcccgcactgaaaattccgctgttgcacccagacattgccgctgtgatgacaacaaagttaataatgcccgccgctgctgtaattcctactttagcaaacgtagaaacaaacggactgccgagtgaatccagctcgttccacggatacaccgttacaatcacaaagatggcgccgatataaaaaattaaaatacgccaaattaagctttgaattgcacttgttaacgtttttttaggatcttttgcttctcctgctgtaattccaataagctctactccttgataagcagcaataacaagcgacaaggcaaagaaaaagcctgaccatccgcctgtaaagaaaccgccgtttgcccacaaattcgacaggccaagcgcttcgccgccgtttccaagaccgaagaaaataaggccaagaccggcaataatcatgagaacaatcgtaacaattttaatcattgcaaaccaaaattcaaactctccaaacgatttcaccgaaattaaattggccccaccaagaatgaccatggcgacaattcccggaacccacgccggtaaatgcgggaaccagtactgcatataagctccgactgcaataatctctgccatgcccacaatcacccattgaaaccagttgctccaagccgtgatataaccagctaacggatgaatatatttatgaccgaatgtcgcaaatgaacccgtacttggctctaagtaaagcatttcccccattgcacgcataataaagaaaataaaaacgccgcaaatagcatacgcaagcaggacggatggccccgtccatttaatggtgcttgctgaacccatgaataaccctaccccaatcgttcctccaagagcaatcatttggatatgacgagattcaagccctcgttttaactctttgtttgccaatttacttccccctagcccctcgtgatgattttctcttctattaagaaattcttttattcccctgtcctgatagggaactatcatcttttttctttttcgtaaagaagtacgaacataccacaaatacagcaatcagcagcgtgagataaaactgagtgcgaagggaatcaataaatgccatcgcaataaagatacttgtgatcgccgcaatcgttccatacgttaaataaggaaacagccacattctgatttttaatgcttccggcttttctttttcgtatttctttctcatgcgaagctgtgaaaaagcaataacaaggtacacaagaagcgctacgcctcccgatgcgtttactaaaaataaaaagattttatcaggtgaaagatagttaaaaccaacgctgatgtaagaaatcacggtacatcctacaatggcattaaacggaatgccttttttattcactttcaaaaacatgcgcggcgcgtctcctttttgcgccattgagtaaagcatacgagaactcgtgtatagacctgaatttaagcaagacaaaacagcagtcagtacgataaagttcataatttgagccgctgccggaacgtttaccagctctaatatcgaaacaaacggacttttcatcaagcttgaagaatcccacggaagaatagtcactaagattaaaatggacccaagataaaaaattaaaatacgataaataacggtatttgttgcgatggtgatcgctcgctcaggctgagccgattctccagcggctgttgcgacaatttctgtccccataaaagaaaacatgacaatcgccactcctaaaaagacggagctgattccatttggaagaaatcctcctctatgaagaagatttgatgctcccggagactctactcccggtattaaaccgaggatgatcgctcctcctaaaagtaaaaacagcactaaactaactactttaataagcgaaaaccagtattcaaattcaccaaatgatttaacagagtataagttcgttaacgttagtaaaaacgtcaggatcaggctcacgccccaagacggtaaagacggaaaccaatattgaataatcgttgaacccgcaatcgcttcaactgcaataacaattacccagaaaaaccagtacagccagccgattgtgtagccggcccacggcccaagcgcttctctggcatatgtggcgaacgagccgcttgaaggattagccgtagacatttcccccagcattcgcataactaaaatcaccagcaaaccggcaaacgcgtacgaaaaaatggaaccaggacccgctgcgttaatgagcgatccacttccaatgaacaaaccggcaccaatgattcctcctaaagaaatcatggttatgtgtcgaatttttaattctttttttaactcaggcggttgatgactcatgttaaaatcctccttataggaaccgtcatttaaagaattacacgttcttcgcatcgcgcgttaaatatgtaagcccttacaacaatatggacaaataactgctgtttttctaccctccttctatctgtacattcaaatgaagccttcacttgacgaaaaagatagcttcattcgacaaaaattacttttcgaattatatgataatttatattgaacaactttgtctattgtttttttgaaaggaagatcattttaatttactaccgataaactctttcccctatcgtaattctttacttcaaaacatcttttcttatactttaccgacaaccctttcttttcgttttgttcaaaatcactataaaaaccatagattcattgtacatttaaacaaaagtgtttatttttaaatttttttgaacatttttgttaaaaaactatgtacaaaacgataataaggtgattataatacaggtatagggtgttggaatattaattatgttgcaaattttctaaaaaaggggtaataaaaatgaacacaatgaatatcaacgaaatcaaacaatacaaacacgagccttttacagactttacgattgcacaaaacaaagatgcatttgaatctgcattagaacttgtacaatcagagcttggcaagaactatcctcttgtaattggcggagaattaattacaacagaagatcaaattcagtccattaacccagcaaataaaacagaagttatcggccgcgtgtcaaaagcagatcaagacttggctgaaaaagcaatgcaagcagcactttctacctttaatacgtggaaaaaagaagcgccggaagcacgagcagatattcttttccgcgcagcggacattattcgccgccgcaagcatgaattttcagcttaccttgtgaaagaagccggaaaaccgtggaaagaagcagatgctgatacagcagaagcaattgacttccttgaatactacgctcgccaaatggtgcagctaaaagacggtgcgcctgtggagagccgcgacggtgaagaaaataaatttaactacattccgcttggtgtcggcgttattatttcaccttttaacttcccgttagcaatcatggctggaacagcagcagcagcaatcgtagcaggaaatacggttctattaaaacctgctaacaacacaccggttatcgcagcaaaatttgtagaagtaatgaaagaagctggccttccagacggcgtactgaactacgtgccgggaagcggaagcgaaattggcgactatttagtagatcacccaaaaacacgcttcgtttcatttacaggttcgcgtgaagtaggctgccgcatctatgaacgcgcggcaaaagtacagcctggtcaaatctggctaaaacgcgttattgctgaaatgggcggtaaagatacggtcgttgtagataaagatgctgatttagatttagctgcttcttctattgtgtattcagcatttggcttctctggacaaaagtgttcagcaggctctcgtgcagttgttcaccaagacgtatacgatatcgttcttgaaaaagcagttgagctgacaaaaacattaacaatgggaagtcctgaagatgtgaacacgtatatgggacctgttattgaccaggcttctttcaacaaaattacaaagtacattgaaatcggtaaagaagaaggccgtttaatgacgggcggagaagcagatgattcaaaaggctacttcattcagcctacgattattgcagatgtagatgaaaaagcacgtttaatgcaagaagaaatcttcggcccagtcgtagcattctgcaaagcgcgcgacttcgatcatatgatggaaattgctaataatacagactacggtttaacaggtgcccttctttcaaatacgcctgagcacatcgaacgggcaaaagaagagttccacgtcggaaacctttacttcaaccgcggttgtacaggtgccatcgttgggtaccagccgtttggcggatttaacatgtcaggaacagattcaaaagctggcggtcctgattacttgattctgcacctgcaagcaaaaacaacaagcacgacgctttaatactcagtagagcagccttaggctgctctatcttaaaacaacaagggattttttctatagggggagatatttatgttagcagaggtatctaaaaatgtgtttcttcacgcttcccaaaataaagcgctaaacaaagcggcgaaaaaatggggtcttcgctttggtgcagctcaagtggtagctggtgacacgattgaacatgcgatcaaaaaagtacgggaactgaatgaaaaaggacttgtttgtacgcttgatcatttaggggaatttgtttcaagcaaagaagaggctatcgaagcgactcaatataatgtcagaacgctggaagctatggggcaagccggtgtaacgtgcaacttatctgtcaaaatgacgcagctcggtttagatattgaccgcagtttttgcgttgagaacatgcgccgcattcttgaaacagcgaaaaaatacgataacttcgtccgaatcgacatggaagactacgctcactgtcaaatgacgctggatattttacgagagcttcgcaagacgtttgataatgttggaacggttattcaagcttacctgttccgcgctgaacaagacgtaaaagagctaaaaggcattcctcttcgattggtaaaaggcgcgtatcaagaatcaccaaccgtggcgtttcaagacaaagcccaaattgacgaaaactatatgcgaattattgaagaacatttgctcagcggaacatacacggctattgcatctcacgaccacaatattattgcaaaagtaaaagagttcgctcacaaaaacaacatcccgcgcacgcagtttgaatttcaaatgctgtacggattccgcacagacatgcagcttagccttgcaaaagaaggctatacaatgcgcgtatacgttccatttggcaacgactggtttggctactttatgcgccgcttagcggaaagaccgcaaaacgtcgcatttgctttaaaaggattcttttctaaataagcaggcatttagtaagtttcttaatgaaaacgctatcatttctttgtgccctttgtagatgcttctgcaaagggattttttatacgatttctcttccctttcagtatgtattaaggtaaaataaaaatacgaacaaacgttctttttatttcaaacaaaaaggagagtacatatgaatcctctatcaaaattagaactgcctcctaagctagaaccttaccgaaaagaaatcgaaaaaacatgtaagccttacatccacatcaatacggttatgaacagtccaaaattatatgaaagcaagtttggaggcaacccttaccttcctctagaagcaaatcatcctcttgattctcaaggtaagccgatgctcctgatggcacaaatcaatttttctgaagtaccttcctatgaaaatatgcccattcaaggcatgcttcaatttttcatttgcggagctaataacgaaagcacgggcgatatgtacggtcttgattttgaccatcctacggctcaaaaagactttcgcgtcgttttttatgaagacgtaaccacagataaaaaaaagctaacaaccgattttacgtatcttgaagacattgaccgggatatgttccctattcctcaagaagtaggcttacagtttgaaataaaaatcgaacccgtttcccccactgactatcgatataatgatatagaatcagatttatttgaagatgaagaaactgaagaaatctactgggatgagcttacgggcgagtatcataaaatgggcggatacgcttttttcactcaaagcgatcctcgagactacgatgaagcgctgcgagcatacgatgttctgcttcttcaattcgccatggacgacgaagccgatattatgtttggtgatgcgggtgtggccaatttctttattaaagaaaaagaccttcgcaaccgtaactttagagatgttttatacaactgggactgctgttaacaaaacgccctcttagaaaagtatctaggagggcgtttttccacattattattatttactactcagcctgttttttcgtctcttgcagcattcagcgtttctttaaactgctgtagcacttttgcatctgcaaatgtgcttgtaggaataacgtatccgctcattgcgctaacaagaataaagatatgttcatcggtttctctaatttgagtgatgcttgaccaaggagtcttcacttctccttttgagcttttctctaccaagccatcttccgtaaccatcatagtatgcttacccgtcagactgctgttatctccttcatttattacctttacaatgttctttttaatacttccgtaaaagtacttcggataaaatagaaaccacagcaccgcaagcagtgcaaacgctacgaacatgctaagtaaaaattctccttcaacccacgaaacaagcaaaggaataagaagaaaaataagcgacatccatcgctgaactctcagcactttttgtactctttccgaatattgagcgtgatgcatgttaaaagctacgtaatcatctttagttaacgtatagtgatattccatattaatctccaattctcttaaataacaacaaaataaaatatacttcatttggtgttatatgtatataaaataataagtttttcttatgaaaagcatcaactttttatcatttatttacagtgatacatcacgtaaacttaactagtactctactatttaaggaggaatgtttatgacttttacactgacgcatattgatcatattcagctagctgcaccaccgaattcagaaagcgaagcacgacactttttcggaaccgttcttggattaacagaagtcgaaaaacccgaaagtctaaaaaagcgcggcggcgtgtggtttgaatttggttcttatcagctgcatattggtgttgaacctgccttttcacccgcaaaaaaagcgcatccaggctttcatgtcaaaaacctccctgcgttcaaagatcatctggctagcttcggtatttcttttatagaagacaaaaacattaccggtgtcgaaagaatttacgtggatgatccttttggcaaccgaatggagttcttagagaaagtgaacctccctttttctaactgaatgttcgacaaaacaagagctcttatttaagagctcttgttttcttttagtccttctttttgcttttctttccacagcatgtatagcaacatccccagcacacaaaatgccacgccaaacattgttaaaggaaataaaaatgtattaataaaatgatgataaatccatgagtcgttcatctaaccagctccaatacacaccgttttttcacagtatgccctaatataagcttttttatgttgtgttaaatatcatggtttctatcatatttctatttctttttaatagagtaaatagtagatacataacattctcctcttagagttctcatccgctgatttcaaaattttattagaggaggtttactctatgaaaaacaagtttactgaaaagcctaaaaagcttttttggatcctttcttataaatcattaattatcgctatactatttgttcttttaacatcagccgctatttttaccgtcacgtattcaactcttcagcatacgctgcgctcaaacgttgtctatcaagcactatcaaattataaagcccaaagcttgttctacttcatgcatacggaaaaccatcatttctctcatgcctttgaagaagacttctccccgcctcctctctcttctgtcgccctgcagctggcgacgaatattcgcgtggcagatacaagaagtctatttggatcagaactgcccggcttttctatttttgattctcatattctattagccggtgaaggaacggattataccacgattccccatgaatcggctcctccgctcgaaagcatttcaggcgagcgtgatttggatcctgctgaaagcaaaacgtacgaagaaagcaaaaaacagtctcaagtacaggccaagcaaagtacgggagacagaaaagttgtgtacatctaccacacgcacagctgggaatcttatttccctttacttggtatgcaaggtgaagcgaatgaaaataaagccgttgataacaaaaccaacattacgctcgttggtcaaatgctaggaatggaattaaaagcagacggaatcggttcggaagtagatacaactaatatgacgcaaaagctgaatgaaaaaggctggggtacaggacgagcctatatgatgtctcgcagcgtcgtggaaacggctcttcagcaaaacaaagacgtcgattatttaatcgatattcatcgtgattcactgcgccaagaaaaaacaacggccgctatcaacggcaaatcgtacgctaaaatgatgattgtattaggtgaagcgaatccgaaatttgatgaaaacgtgaaaatggccaaagcgatccatgaaaaactagaggaaaaatatccaggtcttagccgcggagtattaagcaaaaagaaaacaagcggcaataacgggctatataatcaagatttatccgaccgctccattttaattgaagtagggggcgtcgataacaatatggaagaactcacaaataccgtcaaagctttttctgatgtgttcagcgagtattactggcaagctgaaaaagtgaatgcgcagtaaacaaaaactagctaccccaggtagctagtttttgtttttatgagagtcacgcttctcctctttttcacagacaaagcacacaagcttcccttcaacaaccacaccgtttaaaaatccctctaaacagtacacgttcttttgacatactgtgcagattccaacgtactctttcacaaattcctcactccttccatacgattaaaaaccataaaaaaagctctattaaagagcttctttctgtacataggattttccttcatttcaacaaacggctcatttcctcgggagaaagcggcttatcgaatagatagccttgaccgatatgacagccttgctccgtcacaaactgcagctgttcttcgttttcgattccttctgcagttagatcaaagttaagtttctttcccatttgaataatcgtttccacgagcacttttccaacttcgtctaagtcgtcaataaatgatttatcaatttttaacgtattaatcggcaagtgtttgagatagctaagggatgaatagcacgttccgaaatcatccatcgccacttttacgcctagactccgcagacggtttaacactttttttgattcttgactgttttgaataacgctttcagtgatttcaagttccagaaagcgcggctcaaggcccgttcttttcaaaatttgttccatctccgctacgaatcgtgaggacttcagctgaataggtgatacgttcactcctattttactcgctagtgaattcagctccgtccatgctttcatctgcttacacgcttcttctaacacccacttgccaaccggcacaattagatccacttcttctaaaataggcaaaaattcatttggatagacggtactaaactttgcgctattccagcgaataagcgcttctgcccctatgacatcagacgttttcaaatcgattaacggctgataaacgagctgaaactcatctctttctagcgcatactttaactcattctccatgctgattgttttaattattcgttcattagatgaagacgaactcatttcatatgtgtttcgtccattccgttttgctacatacatcgcaatatctgcttgcttgatcagccggtcgattagttcatctgcgtcttttggaataatatgctgctgacattcctttgaaaataggctgatgccaacgcttgtagaggttaacactttatcaccgtctatataaaaaggaagcgccatttcttttacaatctgttcggtcatttcttcaatttcctcaacagtttttagtgaatgcagcactaaaatgaactcatcgcccccgtgcctcgagataaaatcagaggaaggaatacattttcttaacctttctgctacgcgcctcagcagcacatcgccgtgatgatggccatgcgtatcatttattgatttaaagcggtctaaatccaaaaataaaatggccagcagttcaggagattctcgatttagaagcagttttttcagctgcttgtttaaccagtagcgattaggcaaattggttaacggatcataataagccatttgcttaattttctcttcatatgcttttcgttttgtaatatcattgcgaatcgatacgtactgatacggcttaccccgctcatctaaaaaaggaacaatggttgtatccacccagtaggacgaaccgtcttttgccttattttttatttctccgtgccataccttaccggacctgatcgtgctccataactctttaaaaaacaagcttgaatgatgtttcgaattaataatacgatgatcctgaccgagaagctcatgtctttcgtacttagaaatttcacagaatttatcgttcacgtgattgatgaatccgcgactatccgtaattgctacaatcgatgattcatttaacgcaagttcaatatcatttagttttttcagcgcttctttaaatttatattcaaaatgcctattttccatagcctatacacctttatcaaaattttaacgataaaacaaaacccatgacgaaatgatagagaggaatcgtgaataatgaatacaaattaaccagtaacggacaacggattggtttgtctgattaccttatattattaaaataacaaacgtaggatcgctgttttcctcttttcaccttcacaaacttcttacaagaagtttgtgaaaaaattgatagattgtttcgtttatccatgtcttttattacaacttttctatggtaccattaaaatgatttttatagaaatgaaagtgtactttcttcacttaatcgacataccttttgatggtgaacaaaaaaaagcctctgctttagacagaggctttttacattttcttcttacgtgctcgtacgtgtcagccaaggaagaataaggttttgaaaggttttgttgtatacaataattcgattcagataataaggatcgttatcttttgtaataaggtggggggctaggatagctgcttggtgaaaaccagcatcttttacaatcttagctacgtcatcatttgtattgccgtatggatatgcaaagtaaaccgggtctattcctaaatggttcttaatcgtttctttgctttttcgtaaatctccagcaaacgcgctgtatttagcaggcgtcagaaataaaggcttgtcttcttctaaacggtgcatatcatatgtatgcgaaccgattgtcgcaaggccgctgtctttcatttcttttagctgactccatgaagccatgtttaaattttgaaaatccgttgcccccacttgtcctgcgattacatatagcgtaaacggaatgttttccttttttaaaataggaaacgcgttttgataaacagtacggtcgatatcatcgaatgaaatccatacgcagcgttttggaaacgtgcctttttgctgatacgcttcaatatcttttggcgtaacaaacgtagtgtcaagttccttcagcttttttaactgatgttcaaaatcattgctgtagacgctgtactctgtcagttcgtcagactttgtaactgagctgacaactcgattaaaccaattatgcttgcgcacgcgatgataatttaagcctaagcatccgttcgtctcaagcgctggctccacggtcgttgttgctttcgccttgtcttcccagttcactactttaaagaaaataaagccaactaccgctgccgcaatcaaaagaaagaatacatatttcttcatgcgtgcttcctctcttcagtatgttttaacggattaacatcaaactcgatgtactgtgcacgctgaagctcttgaatttgatccttagataaaagctcaagacgctctaaatctttaatactcgtatacgccggctcttttcgtcggtttaagcttccaaatctctttttgttgtaggatctccataaaaacagagccaggaaaaagaagcaaaaaatagcaagtccaattactaaaaacgttcgaatttcgccgttcgtcgttttgaacgcaatttttaataccccgctgtaacggtcatttacgccgataacagctgaaagaaaaaaccaaagaacaatggcacaatagagccaaaaaacagatgaaacaatgatgcttaccactaatcgagcaagaggctgtttggcttgaatcatgatttgctcttcgttaagccgcggtctggactgctccatgtagcatagcctcctttcactctagatctgatagcacgaggaaatgcgcccactaccacaatcgtattcacaatccaataaagcgctgggtaccatgcagcccatacgtaataccgcttcacgttatcgtatttcgaatcaattttcagcgcaataaacagttgaattaagctcataaacacaagggaaaatgacgtaaacgtaaaccaaaacagcatgtcttgggggctgctcgccgtaacaagcagcatgatagtcacaaacagccatgcgaatgaccaaagggtactgatccactgctctaggtatacaatccaaattctgcgctgcttccattttaataacactttccagtggcgaagcattacctcttgtccgccttgagcccagcgtactcgctggttccaaattccttttaaggtttcgggcacaagcatccagcacaatgccctcggttcatagcggatatcccaaaagcgctgctgcagcttccagctcacggcgatatcttccgtaatcatgtcacgatcccacagctcaacgtctacaagtgctttctttcgaaaagctactactacgcctgagaccgtcattacttttcctaaaattcactgtgttcgtttaatagaaccgataatagaagaatactcaactagctgaatgcgactcagcagcgtattacggtttcgaatgcgcggatttccggtaacggctcccagccgttcccctttatgaagaaaatggtggattagataatatggagcgtcttgatctaaaatagcgtcggaatctaagcagattaaaaactcagctttagatgcgtgcgcacctaaatgcaacgcgttggcttttcctttattttcataaagctgaatcacacgaactttagggtgatttctgctgatttcttttaaaatatcagttgttccatccgtactgccatcgttaataaggatgatttctttagacggataatctaacgccaaaaggtgcttaagcgtttcttcaatcgtctcttcctcgttataacaaggcactaaaaagctcactaacggccagtcaattgttgaaaaatcaactttaggatctcggtcgcgatagcgtatgtaaataagcgtgcctgcaatccaaaataaagacatgataaatggataccagaaaacaaagctcgcaagcttttcaaatccaggtattaatacgtgttgcatattcatttttctgactccttcacaccaattaaaattgcacagagtgacaattttatcactaaattggttaaatagaacatagtaattttaaccatctaaaaaaaagatacttttaaactatttttattcctatattatacaactcttatatgtaagtaagaagcaccaataaaggatgggcaagttacctacttaaagacgtgacatatagtatctttgtagattaaaagcgtgatgattgcaggtagtatacgaaaaaaacttttccctaaggaggaataacaactatgaacgaacaaattcaaaagctgctcaataacttaattcaacttgaacacgtctcttcgactttatacctagctatgtctaactatatgaatcgattaaactataaaggaatgggcagctggctgcgtctgcagtctgaagaagaacgcactcatatgctaaaactcattgactacttagttgaccgcggcggaacggtagaattaagctctttgcctgctcagccaagtgagtttgggacaccgttagaaacgtttcaaaaagtattggagcatgagaagttcgtcacgaattcttatcgtcaagcgtttcaatttatcaaccaagcgaatgaccctcaaacgttagtcatcgtgcaggactttttacgagaacaagtcgacgaagaagctcaagctcaaacgattgtagaccgtttaaaaatcgcccaaaataaccctgcagctatctttatactcgatcaagaactaggacagcgaaaagctgcaccagcgggtggagcagctgcgcaaggttaaaagcgcagaagagtatagaacaatgtgcagaaccaataacacgacgcccctttccttgtgtcgagttggtattcatcacggctattatggatatccgcccaatgtgtatgacgccattcaaaggcttatgaatcaatatatgcatcagcttcactatcatcggcctcaatacgttcacgtctactccgtgcatccttctcttattcactactaccttcactaagttaaggaaaatagagaattttccttcatgaaaaaattcaccgtttctccaccctaattcaggaattccaatcaaaaatttggatatttatgctgatatagattttgttactcatataaagaaacaattaaggtaaaaatcgaacgtgtctgaactggtttttattatctcttgccttaggaccgcttgttaccttcatcttactgctgattgaaaaacgataaaaattggttcaaagctcattgctttgagcttttttctttattttccaactatgactgctctccaaaacaagtggaaaaagcaccgcttgaaatttttttctagacttaatatgcataaatctattcatcattgagcgtaaatctggctgcattttgttaataaaaaacctactctttagaaaaggaaggaagctcctttttaaacctttgtttctgacaataaaatcaaaagaaagaaaaacgcttttattctatgcttttctaattaacagattaactgttttcttcagataattaccttttacatgggacagctgtgcatctactgaatgaggtcaaacttcctgtatttctcaatctgtaggatgaataaatactcatttgcttcatttgacaaagaaataaatgctgtgtaatttaagtaacataccccatctaaactgtttttagaaaggattaagtagcaagatgcgtacaaaaaaagaagagtgtataattgacgaaatgggaagagtatcccttccttctttgtttatgcaactaacaaaactcgagacgaacgacaaagtttttttacggagctgtgatgattggattattatcgatcatcatgatggaaatgtcccggttccttctcgtatcttcattcgaacaattgaccacatgagtagaatagtcattccaaaatccctgcgagatgactatgaacttaagccctttgattatgtagaactatacgtggtagaacagcaaattgtgatgaaaaaaagagacgaaaaatcgatagcgctttcacaaaaacctgcggcgcctcccccttattatgcaacattaaccggacggcagattcagctcacttctgaacttttaacgttagtcgaattggatgccaacatggaggttcaattttttattaaccaggaaaataacattgtgattcaaaaatatgaaatgagttttggtaagaaaacgactttaacatttacggctcaatctcgaaaaattgatgaccgttttcgacttactattcctaaaaagctgcgagatgatttctctattcattcaggtacgatgttaaaaataaagaagagtaataagcagctcattttagaaaaagtggagaatggaaaagagattagcagcgtattatctcagcaaatagacgcagcaattgttaaaaaattatcgaaataagaacgacgcaaaaaacaaatggttccctatgacttcatagcaaaagctaagagttacgcatagattcaccctttctatactcaactcttagcttttagacttatcttccgtaaacgtgtacaagccggttactccacataatagcactacttccaaaataaaaaaccatttccatatctatcaaaatatttgtaaataatttcaatatatgtgtataatgaggtactttgcatagaggaggctgatttagttgaagatttcaacaggaactgaattttacgataatgacgagacgtttttggcctatacaaaacgccggcagcaaaaagaaaatgccaacgatacgattgaaaaaccggccattttacagcttctaggtgatgttacagatgcaaacgttttagatttagggtgcggaaacgctggatttggcgcggagcttcttgaccagggatgtttctcttataccggggtagacggctcgatcaatatgataaacgcggctcagcaacagcttttaaactatccaaatgcaagagtgctccatgaatcgatggagcattatactccaccacgcaccgaatacaatttggttactgcaagactgtctctccactacatggaagacttagcttccattttcactaaagtgaatcaagcactcaaacctgaaggaagatttattttttccgttgaacatccagtcattacttccactttgcagccttctgctctgcgcacaaactggaccgtggataactacttctcaatgggattccgtcagcagcactggatgggcggatacgttcaaaagtatcatcgcacgcttgaagagtacttttctttgatgcagcaaagcgcattcaccgttacaaatttaaaagaagcatgtcctcaaaaagaatatttcgacagcgctgaaacttacgagcggcgaatgcgtattcctttgtttttactgatgagcggcgtgaagaatagataagcgcctagatgaaaagagcatcaaagcctttgttaaggaaacaaaggctttgatgctcttttacacttactcttcacaacagcaacatacgctgtgtctctgttgtttggcgtcactaaatccctctttctttcaaaaaactattttagttaatcgtctaactttttatcaaaaacaaaagtagtcatcgcaacatcttcttcaatattaatgtctgaaaaaactcttacaatttttgcatgaacaagtttttcaaacttatttcgtatctcggagcaatcataaatttttttcactagctctgtacgtgcctcatgaaccattcttttgccttcaggagaagttatcataaatttttctacattcgtaagattgcctttcatttcactaacagcccacgcatctacaaagcgagtagtaatttctctcggtccatttccaacctgctccttacggatttcgcgcactaaattactaaattcatgctccttatttctactcatattcaaattctcctttcattatcttctaatctttttttcgttaacattaagtaactaatcgttaaagcaataattcctagcgataaaaataaacttccaatttgataattgttatttacaatgataaatcgtattgtagcagtaattccaatgtataaaagataactcaacggaaaatggcagctttccttaaagtaagtcataatcatcgaaacaaaagcaaaatataaaaagaaaaccaatacttttccaaggattttatgaacgttattatttcctgttaaggcatcattcataatataaaaaagctctctcaataaaaaataaacgagtataaaccctaggacaatcagcgagacgtttaaaataaattgatatgttgtaattagatactgcctttttttacgtaaaaatagttccaacacctttgtatcccttccttttatctaacttccttacattgattctattcatgttagcaaaacgctcaaaaactattagcttgttttagagcttgctgctttattagttgtcttcaacatatccactcctccacaaaaaaacccatcataaagagatttgtgcatagctgtacaaatttctttatgatgggttaacgactcagcatttttcaatacttgttatccagcccttcatatatctacatatagtcaagtcaccaaagataaaaaaacatatataatgaatttctatcaataagcttctttacaattaattatagcgcaatacgtcaaaacttcaaataaagatttacttagcgtttgcactgatatagtttttaactacttcttcatttaacattgatcggcagcggagcacaagaagctacaagcttttgttcacgcatttcttcccagaaggctgccggaattactgtatttaatgccgctttgtcttcagcaatacgctctggacgactagcgccaggaataacagcagcaaccgctggattagccagtgagaactgtacagcagcggctttaatgctgatctgatgacgatctgcaatcgctttgattttttctacttttgccataatgtctgaagatgctttttgatattcaaagtgtgtacctccagcaagaacgcctgagctgtacggtccgccgacaacaatgtccatattatgctttacggcttcgggcatcactcgctgcagcgcacgttcatgatctaacagcgtgtaacggcccgctagcaatgatacatccggctttgcttcttctaactccagcatgatttcaattggttctactcggtttactccaagtccccatcctttaataactccttcttcacgcaagcgcgtaagcacacgaaatgcgcccgttcgagcagactcaaattgtcctacccactcatctccataaaaatcttgcgcaacatcatgaatatacacaaagtccaagcgatctgtttttaaacgatttaagctttgctcgaccgaacgaagagtggcatctgcgctgtagtcattgataattttatttttacggccaaattcgaaaagtccgcctttttctcccatatcacgtgaagatgtgtcttctagttcatctgaaatgacgcgacctactttcgtacttagcacatactcatcgcgatttctttttgacagggcttcaccaaggcgcatctcagctaagccagctccgtaaagaggagctgcatcaaagtaacggatgccgctttcccaagctgcatcgaccgtcgctatagcctcttcttctggaatattacgatacatattgcctagaggtgccgttccaaaacctagttttccttgcggtatctctctcatattcataaaacctcctgaaatttttataattctattttagaaattgatcagtatgaaggtaaactcaacgactgatctattcattaaatgtcatattatctcctgacaaaatttattatgaagcatatacacaataaaaaaaagtacgcacttcaaagtaatatgggaactaaaaagtaacctactaaggagtaaatgagcttttcaggctctccttttatttatgtactttctacttcttactcatgcaaacaaacattttgcatacaataagcagaaagctactttataaatgaggtgagattcttgagagatgaatacttcaaaaaaattgaagataagctcgataagcttgatgaaatggacgattccacaatgaaagaagaacaaaaagatgaatattttcaaagtctgctagatgatatggatgatttgttgaaagacatgcgccagcgagaaaaagactcgaatcatctcgtcagcgaacatatgaagacggttaatgacatatttgataacgcaatcaaaaatttaaaaaaagaccgaagctagcgttatagcacttctactccattttaatatactgatttttctgttttttaaatataaaaatatagtatttcacatgtgaaaatggtattttcagtatacgcaaaaagtaggagtgaaaaaaagcaatggaaaacagtcattttaaagaacaagtaaaaacgaaggaagagcttcgcgatatagtcggcgcgcctaacaaattggcgcatcaaaaaataatttcttatttagatcgacactgccgggaatttattaaacattccccttttgttatcatcgctacagctgattataaaggtatttgcgacagttctccgcgaggcgatcaccctggttttgtacaagttgtcgatgagaaaaggctattgattccagagaggcgtggcaatcaaaaagtagattcattggaaaatattttatctaatcctcaaatagggctgctttttttgattccaggcatagaagaaacactgcgaattaacggcaaagcttgcattgtaaaagaaaaagcgctgcttgaaacaatggcggttcaaaacgaaactccgctgctcgctatgggcgtcgaagtacaagaatgctttctccactgcagcaaagcattcaagcgatcaaagctgtggaatccagaatcttgggaaagagtcgaaacgcttccttccgcagctcaaatagtcgcagaacacgcaggcttttccactttagaaagtcgtaccaatcccgaagaaagcaaaactcagcacctctatgaaaaaaagccgctgtaatgcggcttttgtcattttaccatcagaaacagtatacctccggcaatgatcagaactggtaacaaagcaagaagcacgccttttttcgaacttcctatgtattcatgatcaccataggcgcggcctgctctaaaatctactttcacctgagattcttcttttttatgttcttttttcatcctctttgcctcctagcggcatttgagcgtcaatttgcttaatatgatgctttaaatgagcaatataatctttagtcaaccactggagcgaaacgaactttccatcttttaattcgaattgatacatatgcttttctgttggtatatgcaaaagaacggaagcaatttgcttatttaagctgtgccatagggcaactatttcttccatgggcatatcttgatagtgctgcagttctacccattcatcttgtttgtaaggcgtcaggaccaaaggtgttttttcatgctgcacgttgacaaaccgctgcaaattgtgaagggctgagtcacataagtgccccacaatttctttcggtgaccacttcttaggagcaagacggtttgacgccgctgcttcagagaatacttcaagctttttaggaagctttatcatccattcatttaactcaacaaccgtcgacttcacgttcatttcccctttaagcacgttttttaaaaaaccttccccatataatattcatcgactaattttccatctacaacgagcgaacatatttttttcccttctattttaaaacccatctttttatacagcgaaatggccgtttcattgtgggtcataacggttagctctactcgtttgatgccgatacgcgccgcccagttctccatttcttcaaacaatgaagtaccaatcccctggtttccataggaacgcagtacgccaacagctaagtatgcgctgtgtttttttcgattaacgcttccgccaatcacagataaatgtccgacaagctgtccgtcttgttccgccactaaaatggtcgagttcggcatctttaaaaaagttgtaatcatttttttctgctgttcgagcgtaatcgcacgctcattttcctcgtacagcatatatgctgtttctcgatcaagctctttatttaacgctaaaaaagcggctgcatcagaagctaaaatttctcgaatcacgtttacccctgctttcgtgaatagtagttaactagaaaaaaacgctaaaaaacggatgatatccttacacacgtgctgaacgttttccaagaaacgccgtgaagataaaacatacactaaaagcgaccgctgaaacgaaaaagccaagcatccaccctaaagctcgcataaacgtatcttcattgggatacaggggcttaacgcttacccactggatcaccataattaatgccaatattaaataaaagctgcttcccgtaaaagccattttaagacggtttttaaatgatcctgtccacgctgtactaaaggcgctccacgtgaaaatacttacaattgtcgctaaaaacataagaacaagatgcaaataagggatattagtaaagataggaaggaagagtaaacatatcgtagtcccaaaatataaagcattaatgccaaacaaatagcctccgcttagccaatggttttgaaaccactttttcttgctaagacgttctatcattccgctgggcacccacagcgtacgcgaaaaaataatcatcgccagcacaagtacagtgccggctaaaaagaatattaacacctttttatcagcctttctattcaaaataaatatggttaattatactattaataacagaattaaactattgttttctttactaataaagaggcttagacataacaaaattactccaacctaaagacgaacagatgggataaataagctggactgcttgttacaccgctgttgatttccgtgcaaggcttcgctttccgcgggcggccggtgagcctcctcgtcgcttgcgctcccgcagggtctcacctgttccgcttttcccgcaggagtcttcgccttgtcctccaatcaccagctagaaactactatatacatgacacctacgtccaccatactaataaaaaaaccgaacgaagttgattctgcattaagaatctcgattcattattcagatcttctttcaacgaaaatacttttgtcacagcttttttttacgcttatttacattcttcctccggtaaacggattgatttcccctgttaaatcacgtcctgctttcttttcttcgtctgcgatgcgcttgccaatcgcaattttattccaaattagtggcacccaaatacacgctccgaacaaaattatccaaaaaagttctcccatttcttccaccctttcattttctgctcttattttgaagacaataagaaacgcgtacacgctttttactctttgtttgaatcactcatgccgtatgaaaagaaataaaccaggattgataaagccattccgtacacggtccaagccgctagtaaaatggcatactgatgattgataaaaaagactccgcttgaaatcagcagcaggataaaactaatccattttacttttttcattactctatcccctttacttaactttttacagtaagtttcttattgtctacttgttattacggaaaaactgtataaaagttccatattttaaaaataaacggaaaataatttgataaaacgttcaactatcgattatcatataccttaaagtaagctttaggattcataagtgggagtgaacaatcttgtcttatagcatgaaagaaatgaatgaaaaaaccgggctttccgcaccgactttacgctactatgaaaaagaagggatccttccttttgtagagcgtgatgaaaatggaaaacgcctctataatgatacgaatattgaatggatccgttttatcttagctctgcgctcaacgggcatgcctcttgcagaaatcaagcgctatgtagagctctataaacaaggcgaaagcacaattaaagaacgaaaaaacatgatgcttcagcacaaagaagcggtcgaagaagaaatggccaaaacttttaaataccttgaacaaatcaactataagcttgctttgtacgactcactagaagcagaattaacgcaaaaggaaattaaaatttaaacacaaaagtccgcaggtgcacctgcggactttttattaatacagtgaattcacggtattcaacaactcttctgaccatgtccaatcgctgatttcaaccgcatctgttacgtgatgcaatttactagctccgataatgcttgatgttacagcgggctgattcaatacccatgaaagagcaaactgagacaagcttacttcatttttttctgctaacttgcgatactgctccaccagctgaaagttttggtctgtaaagtagtttcgcagcagcttttcaccatgcgcagcgcgactttctggcggcacgtcatttggtgttttatatttgcctgaaagcatgcctcgtgctaacggactgtataccatgacgcctacaccttcagattgactaaacggcagcagctcttgttcaatttcacgagagagaagattatactgaggctgaacggaaatgaatttttcaagattcattttgtcactaatatgatgagactttgcgatttgccaagcggcataattggagcagccaatataacgaactttgccttgacgaactaaatcatctagcgcgcgaagcgtttcttccataggtgtattcggatcaaaaagatggacttgataaagatcaatgtagtctgtctgcagtcgtcgcagctgattatccacttctctcataatatgtgtgcgtgaaaggcctttatcattttggccttttcctacggcaatgccgacttttgttgcgagcacaacatcatctcgttttccttttaacgcacgtccaataatttcttcagattcccctgtgccatatctaaattcttcgtcttgcccttttccataatagttggccgtgtcaacgaagctaattccgttgtcaatggcgctatgtaaaatagctgccgacgctttttcgtcaatccatcgtccaaacgccatagtacctagacataaatttgatacttccagacctgttgttccaagctttcgatattgcatcgataccctctcctttttatggctgtctctactctctcttatcatacaccttaacgtccactttaaggcaagccttaagcgtgcgtgcatatacaaaaaacggctaggaacaggcagtgcttctagccgttttcgggttcatttccgcttttttttgcaattcgcttcttcagtagacataatatggtaagataaatcatagcttactcgttatcgaaactacattaagctgccgctgttaaaataacggcgattccattaaaacaagcatgaatgatcatacttggaagcagcgactttgtttgttcgtacacccatgcaaacacgagacctgataaaaaattaacgggcaaggtattgtacgttggaatatgcaccagcataaagataaacgagcttcctactaatccaacaacaatccctcctttacgttttagccacgtataaaaaaatcctcggtagataatctcttcataaaaaggtgagatcacagcggctgaaacaaaagcaagtataaatgaaaacagcgacaggtcttgctgtaaactggctgtttttttattttcatacgtcataccaaaccattccattagcacaacaattgccacacttcctaagatcagcacaaaaagccaaaaaagaatgcgcggccagtgccgttttgaaaacgattgaaaaccaatttttctatcaccagcctgaaccatcagcccatacagagctgataaaaacacagctgccataacaaacccagtagctgttccagcataaagttcatttttaaacagggaatgtaaagcatcctgcaatatgccttcaattaagataggcaccccaacaaatgtgacgaccagcataattacgaatgattttattgtccataatccttgatttttttgtttcaatttacttcgcctcccttttacatatattcagtgtaaaaggtgacgtaacgttacctgcaagcatttttttggaggggttaaaaatgatttatttttctactgggcaagccgctaaaaaattaggcctcacggtgcgtacgcttcgttactacgatcaaattggcttgcttcatccatcgtcaaaatcagaaaatggaaaacgctcctactcagaaacggatttaatcacactagagaaaattactttgttaaaaaacttagccgttcctttgcgagatattgaacttattcttcacaaagtgagtatcgatgaacttctagccattcatcagcaaaaacttcagcaaaaagcgatggaaattcaacaagctttagaacatactcacacgcttcgcaacagtataaaaatagaaggtgaattaaactggaagcagctccttcctttagttgacaatgaaactaatgccaagagcagctggaatgatctgctttcggtttcaatagaagaaagtgagattctgcagcatgatttgcctaaaatggagaatgcgagtgccgataaatggattaacatcataaaacgagttcagctttgcttaaagcatcagcgtgcatctcaatctgaagatggacagctaattgcagctgatatactgcttttatcgagtaagctatttggctctcatacggctttagaaaaagccttttgggatgttcgcaaatctcctgaggcatcaagttcacttaatctctaccctattgacagcgaagtccttcaatttattgaagatgcgattatttttcacgaacaacatacaaaggaatgaaggtattgaaaaaagaaaagctgtttgctaattcttcttataaaaaattatttatttcaagcactgcagcaagcttcggagatttatttgatatgtttgcggtgatgacgctttttacatacgtgtggcacgcaaattccctctggattacgcttattcctgtcgcgtacgctttacctagcatcctgctaagtcaagcagcaggaaatttagcggaccgctatgataaagtacagctgatgtttctgtctgaactagtccgtcttctgttcacatgtctgttatttttcacaaatgaaccgcttttggcacttggggtgctgatgctgcgctctatgagttctgttatgaaagtgcccgcacagctctcttacgttcgagaagtggtcaaagaagatcagctgatgcaggcctctactttacaaaacattatgtttcaagttgccaaagttgtggggccgtttctcggagccgccgcgctgacgattacaacgccaaaagcatgcattttagttaatgccgcagcttgtatgatttctattggcgtgctgttttcacttaaaaaagcaggtaaaaacattcaagggcaagctgctcgttcttcccatcaagcgaaagaaacgtactcaaacggctggaaaatcgtttttcagcactcactccttttacgcgtcgttattttgtttcacctttcgtattttgtagtgatgcttgttgacgctcaaattagcatctttctacgagatgtgctgcctcaccatccggaaatgctcggctggctgctttctggaatcggactgggggcgctagcaacaggagtgtatcttaatagaaaaaaacaggttcaccatccatttagactgttatcatttggactgcttctatttggaggggctttatttttcattagctgctttaatccagccgttatgtcacgctatttcattttgattgctgcacctattggaggagccggagttgggcttaatttactgctgtttaactatatcgttcaaacatacagcgacaaggaacacctcggaaaagtgtacggattcatcaacaccttaacgagtgccgttttacttactgctcctcttcttggaggcatgctcgtaaagcttgcaggtgctcagacgacttttttagcggcggcaatcatcatcgtaagcgttggatttgtgagtatgctgatgcctctgcgtgataaacaggaaagaaacgttcagattgacgcataaaaaacagcttgaggttatacctcaagctgtttttatagactcctattcatcaaccagcggctacataaatcaaagcagctaatatgttcggtactgcaatagctccaaatcgttttgcatcttcaactcggctcaccttgcgcgtctttttggatgaaaagaatgtgcctgtacttcctagcacgatactgtcaataaggtatgccaaagctaaaaccagtgatactgctcccattgtgcctgacacaaaatagagatagctccacttttctgtaaaagcagcaagggcaagggcaagggcaagaacaatccctaccgtcacgatacctgctataaatccttttttaatcattgcatccctcttcccttcctgccccttaaattttaccatatacttcttttttgtaagatatcttacatttcattctactatactcgcaccttatggtaaaattagtaagagaggtggtacatatgaaaaaacgtcaaggaatcacgctgcttttatttatactcggagcagcctctatttcttttgggatggctttaaaaaatatctttccttattcccctgcaaccgggtggattttaggaacactgcttttgttaggaaactcgttttatacgagaagatacttacatagaaggtcaattaagaagtaaattacgccctgagccgtatatacaaaccttcattcggttatggtaaaatagataagcaaaaactggatgtaaggagattttgagtttgaaaacaggattaatatctggcattatatctttaattattgtgattatcatttctattacagcaggcaactggcagtatatttactatatttcaggccctcttggcatattacttacggcaattgcactcgtaaccttactggacacatttcgatttgaaacgagaggaccttactttaccccggtccggcagcgagaggataccgaatggatgaaacgttttattattgcagctgtccctcatttagttgcttcatgtatttgtatcttatttttatagaaaccaaaaagccaatgaatgatcttcattggcttttcttttttattatgttaaataccgcgcgacataccgtaataatcaatacggtaatccacagccccttctgcaaatacatttacagctgatttggaatcttttttcgggaatacccgggaagtgaagacaattttgccgccgtttatataaatttcgacgatgcttttgtcgacaaatacacgaacatcgacttcatttgacgctgtccatttttcagagcgaaccacaccgtattccgttgcatattgatggtggaatgaagaacggtcgagtcgcacttcttgcttttctgtatcaaacacgaggcgaagctcttcttctttactattaaatagctctaaaccaaactgtttggcccctatctcgcggaacgtcatattgatttcatatgcattgtttgttgcttcatcaatgatcacttcttcattttttagcgttcctctaaaatgaactgcttgatctcgaagcttatgtaactcttctacaggcttttgaacaagttcatttccttcaagcgaaagctcacgaggaagcgttaaggcatgggcccatccgtattcgtctgacggatagtcaacgtccgggtttccaatccatgcaaatagcaagcgacgtccgctttcatcttggaacgtttgcggtgcataaaagtcaaaccctttatcaatttcacggtaatactccatttcaaacgttaaactttccacatcaaatgttcccaccgcgtaaattacattgtaaatattataaaaattgtggccatccgctttgattccttgcggcgaaaagacaaacacatcttttccatccagtttaaagtaatccgggcactcccacatatagccaaagtcaggaagtgatgttttaacttcgcctttaaatgaccactgaagcgcatcgcttgattcatacacaattaacgcgcccgtttcgttttcacgctgagcgcctagcagcatataatatgtatcattttctttccatactttcggatcacgcacatgtcctgtatacccatcagggacgccttgtaccgctggattatgcgtgtatttttccacacttccatccctgtttagcatcgcgatacattgattagctgaacgtgagccgtcttcgtattttacattccccgtataaaacagcagcccttgaccatctttttcaatcgcgccgcctgagtatgcgccgtgcgattcatattcttccgttggcgttaacgcaaccggaaggcgttcccacgttactaaatccgtagatttcacatgagcccagtgcttcattccatgcatcgcaccgtacggataccactgataaaacacatgatattcaccgtttaattgaatcaatccgtttggatcattcatcagcccgtactgtggatgaatatgataaatcggctgccaggtgtctttgattgctttgtcttttaatgcttctaactctccagattttgcttctaaaatcgttctgtacttcgattcagccatttcttcaatccctccagcatctaaaaaaagagaacgtattctccttgccctctatgatataaaattttaagtgaaaatgctaccaaagaacgaatgttgtcgttttcttgtgtcggattttatagataagtttttttctgtttttatagcagaaaagaaggtttttctgtcaggtggttgaatactatatacaatcaaatttcaccagcctgtacgagcgtccgacggcacttgcacatttttttagcgaatcatttgcgttttacaggaagtattcaacaaaatggtaaacccttcatattacatattataaaaggaggaaatgtcatgacaaaagaaaacgtaaaagaaacagtgggtaaagaaacaaaaggtggaagcaaagagttattagtcggcacgttagtaggcagcgtagtcggtgtcacaacagctttactagtagcgccaaagtcaggaaaagagctgcgtgcttctattcaagacggagcgaatcaagcacttgctaaaacaggtcaagtgaaagaaacggtatatgcaaaaggccaagacctcaaacagcgcacggcccgcctttcacaaaaagtctccgaacaatcttcgcaagttgtcaacaaagtgaaatctctgcgcactgctaaagaacagccgcttgcagaaacggctgcagcagaagagcttgaaacgacagaaatcgttcaagatcctgttcttgaagctgaagcggtgcaagaagaattaaatacaattacgcaagaagtaagtgatttagaacaatctgtcgatgaaacaagacgttaataacaagctgtagagatatctctacagcttttatgtatattcgctacccttccttccacccttcaaaaaaatagcctgcgtacggacacagctctgattccggcagttcttcataacgctgtccgctgtaatacttcgccagcacaatcttaggcttaaaagccgctaccccttcactgtcttctttccccgctccgctttctctcatcaaacaaaaaatatccattcccgcaaactctccgtacccttgatagcacgactcataataaactttaccaggtgtcaccaaatagcactcccgctgccacgacggctgtttactgtagacactcgcaatacttattccactcactgcacacttccagctgcaaattccaaccatacaacgcctccaacgacttgatagtctattcatctacaacttttgatgaaatcaaacatctgttgacatgtacaaaattttatcctccaccaaaaacctatactaccagatatcccgtccccttgacttcaccccaaaagtgttacatcgatagaaataaaaaaggtctgataaatcgaccatttctggtgattatcagacctcaagtttttctgcattcgagcggcttatttgctgttcaagcgatttagccagtagtacgatttcatgatctacatattttgttttgatttcttcgatttccattaatgttttagaaaagctttctgcattatttccctgtctgtgctgcacatctttaaagaaatccagcaatgcctcgttagactgcgttggacggctaaaatcaatcgtgtacattttgtaccccagtgttaaatttgttgtagttgtcataattatttcccccattcttcctatagtgatatatcttctattctttaccctttaattccttctttttaacctaaattaattatttttttcaaaaaaacttcccattataagaaaaaacatccttataacaaggatgttagagtattcttcccttcggtacaattccagatgcaaagtcatctttgaacttaaagctagcagaattgttttccgttagaaaatgtatttcccatttaaagaccggatattcgggcttgtacatttcgactttctgatcgggattttcttctaatcttgcaattactcgtttgaatccttcatatgcaatccaccaatcgcttctagtttcatcggtaataaaacaaatagaaccgtcaattaaatgaaggttttgcttgatatcatcagcatttgtaaaatacgcatttccaaacgtttgaagacaatgatcgcaataacctgctttgcctccatctttataaatccagtgcgcgattggctcactgcagtctttacacgtattcgtcacttcttggagaaatgtttttccgctccactgttccttttcatcttcaaaaacggtccatactaaataactttccgtttgctctgaaataaaaaggcgaaacggctcgtctcgatgccaaaagtgaatattttgttcatctgattcttcaaagtcaatgacaaaattatctcgttctaatatatgtcgaataacattggttaaaaaggtaacatccatataaggacctcccgtactaaacgtgacttctagtaaaaatagcgtttatgagttaaaacatatcatgcgtgctgaaataacgtcaacgattacctcttgctttctccgaaaactggaaaagaaatggtcaaacgcgttataatggtagtcatgttgaaacggaaaggagattttatgaagtttaccgttcaatcaactgcactttttcttctcttttttatttgtttaagcggctgttctgataacgccgagcagtcaaaaaagccggccggctatttagttcaagggcgcattttagaagtgaaacgggatgaaattcttattgcaaacgtcattccgcgagatactgcgcttgactatacaacaaaagaaatacttggttctagcgatgtacagcctatttatgtaaaagtttcggatgatcaaacatacaaaaaaggacagctcgttaaagcatggctcaaaaaagacaaaagcgttcagtattccgttccggcaaaaggcgaagctgttgaagtcaacattttaaaacagccgtagaaaagctcctgttacgggagctttcttcttgtcagctgccgtccggtccgattcattttatgctgttcaaaatcccacttttctaaaaagcgctttgctgatatataaccagattcatataaaaattcaatttcttcttcctttaaggcaaaatccgttgccgtaatcacccccgttggaatttgcaccgttcgttcttttgtctccgcgttcaaataccgcaaatcatgagcttgcagcatcgtggtaaacatacttttaaatagatgaactggcgtcggaataatagcggctgtatcaatttcttcttttacaaatcgaaaaccaaacgtcgggaaacgcggatgctccgtatcaaacagccaaattggaaaattgcttaaaagcgctccatcgacaatgtatgacctcttgaaccctttggatttccagatgacgggacgaaagaaaaaaggaatggacgcactcatcatcacggcttgtgaaatcttcatatcgcttggctgcattccatatcgcggcaagtcgtcaggcagcacaagcatctgtccgttcgaaatgtctgaggcaataattttcagcttatctgccggcaaatccgcaaacgtttcgattcctttttcacgcagcagaccatacacccatttttccaaataatcatttttataaaagcctaaatgaaccatcagttcaatcaagtttccaatcagaggaattcggttaatgatcgttttcccgcgaaacttagcatagtccatgttttgaagctctctgcgaatttcaccgcttttatagccgctcgctaaaagtgccgcaattaacgctcccgctgacgtacctgctagacgctgccattctacattgctttcttccatcgcttcaatcgcacccgtgaatgcaattcctcgaacgcctcccccttcaaatacagcatctgctttcacatttttccctccaatacaactctctactttttatataccctttttttatattcagggtttcattactccataccttttattttcccaacaaaaaaagactgtttctttgatcgaaacagtcttttctttacagtcgctttattaccattcggtagtaattcattgtcagccagtagaaaaagaaataaataatcccgtatactgcatccgctattaaaacagggactatcagactttcaccggttagattcgtaatgaccttcagcgcaaatagactgtgcaagatgccaattactaaaggcaaaccaaacgtaaacagctgctgctttcgaacggcgctcatcatttgagacactgaaaacccaagcttacgcagaacttcaaatcttttgcgctcttgttcggcttcggagatttgcttaaaataaataatactgcccgtggccatcaaaaagacgagccctaaaaaccctccaataaaaataaacaatcctttactcattaagcctgcctgaaacacatcatagtatgaagtacggctttcgccagcttcttttgcgatttgatgatagttcttagtaagttcattttgtttgtttccatcatcggtattaaatacgtacaccgcttgcttttgtccagcttttaaaagcttgttgaatgtatcgtggttgactacaaactgatagccggcactgtcagaatcaagaatgagcaaaggctcggatttaacgacttttaaagcaagctgttctgatttgttcagctccacagctgcggttttacctgtactaggtttaaacacttttccttttgccattgaatcaaaaataacggtttcgtttgcgcttagcgcagggaccgaaacgccattctttcgtacttcttcttcatctaaaaagctgatttgttccctatctttatagtagcccgatgtaataaatcgaaaatccgataaatcagcagagtgcttcacgatatgatacacatactgatttgattggatatctaaatcacgcagcactttcataaagtcttccgctgcttttttgctgtgcagcgtatagtcataaggctgcatgcttctggcgtcggcttttgtattatagtacgaggaatacgtcacaccaactgccacaagtgtagtagccgacaaaatcgtaattagggttaacactcgtgcatttgctttaattcgatacatcatagtagaaacgcttagcatatttgcaaacgaataatatcggcttgcatgctctcggtaaagccccatcagccactcaattgtggctttaaaaagtaaaaatgtaccgaaaatgaccgagaacagtacaacggctacaattagaaaaaacttaggtgtcacaatgtttcccgatgaaaggtagtatccgtagccaacgattaagatacccagtcctcccactacaattgagcgtttcgaattcattttatttacgcgttcacttttgctttctgcttgaaacagatctaatagcgtatagcggtacataataaaatagccttgaaacgatataaaaatggtaacaatcaaaaacactacggctgtttttaaaaccgcttgaatagaaaatgtgagcgtaatcgaaagcgacagtcccataagctttagtaaaaacagcacaaacagccttgaaaacacggtacctagtaaaataccgaccaccagagaaaaaatccccagcagcatattctcataaaaaatcatttttccaatcgtacgtttttcaatgccgactaaatgatacagcccgagctctctcttacgctgcccgataaaaaatgagtttgtgtaccaaataaagacaacaataaaggtaagcagaacgtagtttgaagcattaaaaatgccctgcagcctcagctgttctccaataacctttgaaatcgattggtcgtactgaagcgtagcaaacacatagtacacaataatactaaaaatcattgaaaagaaataaaggctgtaccggctaatatttttgcgcatattctttttaacaagatcaaatacggtcatagccttcaccgcctaatgcgccttgaatgttcataattcgtttaaaaaatgcttgtctcgtttgttcgcctttaaacagctccgtgtaaatttgtccgtctttaataaacagcacgcggctgcagtagcttgaagccagcggatcatgcgtcaccataataatcgtggcacggtcttcttgatttaattgcgacagcttttcaagcaggcttgaagcagctttggaatcaagagctccggtaggttcatcggcgaaaataacagctggattcgtaatcattgctctcgctgctgcaacgcgctgtttttgtccgccagaaatctcatacggatacttatcggccagctcatagatgcctagtcgcgttgcggtgtctttaagcttcgcttccatctctttcttagacatttttataaccgtaagcggaagaagaatattttcttttaccgttaacgtatccaataaattataatcttgaaaaataaaccctaaatgattgcgtctgaaagcagacagcttcttatctttcatgagcgccacgttttctccttgaatccatatttcgccatcggtgggacggtcaatcgttgaaagaatgttcatcagcgtcgtttttcccgctccagatggtcccataataccaacaaactctccttcttcgattgtaaaatcaattccttttagcgcttcgtatacatttcctcttgatccaaacgttttggttacattttttccttcaagaacaatgctcacttttcctcctcctttcgttcttttgtaggccacacgcttttcactcgctgcggcagctcattctttgttataacgtcatatttccgaacttcattgcctcgaacgaaaaggtcaataaccgttccttcttttaactgtttaatcgttgtaaatgtttgaaacgttgtttgtcctttttcatttatcactgaaattgtatattgaactcgtccatactcatccactttttttgcttcttttgggataatcccgtattgatgctccgttgcggctttttgataaatctttattcctcctatacctgctcctacaaccaaaagcagagctaagaggctaatccactttcgcttcatgtacgttccctccttgtgtatagctctatcttactttgaaacaaggaaagattcgtttgaagcagatgacaatctcagcgtgcaatcttacatttttgaaaggttatcaaaagaattcggtttgtagaaggtcagaatcaccgtggttccttcgtgtaaaagtgaattcacctctattcgatggccaagagcatctgtaattttttttgaaaaatatagccctagccccgtagctcccttcgtttttcttcccgcatttcctgtgaatcctttttcaaaaacccggggaagatcttgagttggaatcccttttccttgatcagcgataaataactttacgtactttggcgtttcttcactaaaaaaagaaagctttccttctagagggctatatttaatggcgttagacagcacttgcctcacaacaaactgcatccactttgaatcagtgtacaccagtatgtctagatttttttcatcaatatgcagtttcttttcaatacaccattttgagaagtacgcaacgtttggaaaaacaagttcgcttagcgacactgcctgcacctgataatctttttctaagtactgcaggcgtgcagaatataaattctgatctactaatccgtcaattttcatccactcatcttcaatatcctttagccaaggccatttataaagctctgtacgatgagcattaataagcagcttcatcgcagtaagcggcgtcttgatctcatgaacccaagtcgttacatattcctgctgctctcgctgctgtacgtgaagagcatgagtttgtctgcgatatacacgatctatatgctgcagcaaactcagcatgtcttcttctgcttttgttcgaacatatggctgcatttcttgtaaatcgtacgcatcattccgcagcattaagcttaacttttttagaaatcttctttcttttattcctctccataaaagaaacagaatcagcagacacagcgttagtagattcaaataccaaaacgaagtggacgacaccttaatatcatactcaagcagcagcagagcatcgattacactcagccatataagaacaaataaaatccagcttagtctttctcttaaaaaacttttccacatcttaattcaccaaatatccttggccttttttggtcacaattttatcattcagcccgatttcttccagcttggtgcgaatgcgtgtgatattgacagaaagcgtattgtcacttacaaatttctcatcttcccataaccttcgcataagctcttctcgcgatacaatcttgcctcgttcttccaaaagaagccgtaaaataaaaaattcatttttcgttaaatgaatttcttgatctttgtaatgcaaacttcctttttttaagtctagtaccgcgccgttccactcgataacgtctgaaatcgtgtctccatatgaatacgttctgcgcagaagcgcctgcactttagcaacaagaacatccaagttaaacggcttttgaatatagtcatccgcgccaacattcattgccataacaatatccattgggtgttcacgagaggaaagaaagacgataggagcttttgaaactgtacgtatttgctgacaccagtaaaacccgtcatatacaggcaaattcacatctaaaataacaagctctgggctttctgcaataaatacttccattaccttttgaaagtcttctactccagccacttcaaatgaccactgttcaaatttctctttcactaattcatatattttatcatcgtcttctacaattaaaattttcatgcattcacctctgtattgtcctatatattatgtataacccactgttgaatactttcttaaaagctcatctaattcattagcatgacagcaattttcttaaaaataaaccatttatttctgtaaaacgaagaatgaacgagtattatcgtagtgtaaacttgtatatgttacaagtttccctgtacaaatactacaaaataatgacaatatcgttaataagtaatctttaaactccattaaatgctcattttttgttactatagtatataagatgaaaacttaaactaatttgacatgtggatatgtaaaaaggagctagttatcaatgagtgtacccaacaaattacgcgacaacgcaatggtgatgttaaaagagacaagccgaacattttttattccaattagccacttgccggcagaattgcaggatgcagtaggatctgcttacttatgtatgagggcaattgatgaaattgaagatcaccctgagctagaagccggtgtaaaaagccgcttgctttacgccattagtgacctgttaaaaaagtcttttaacgaagacgagtacatggcattagtaggtccttatcaagctgatttacctgacgtaacgcttcagctcggcaactggattgcgctttgtccgactggagttgcagatcaagtattagatgcaacttctattatggccaaaggaatggccgattgggtagaaaaagactggcatattcaaaatgaagcggatttagatgactatacgttctacgtagctggtctagtaggtgtgatgcttaatgacatttggaaatggtatgacggtacggaaacagacaaggaattagctattgcgtttggacgcggcttgcagtctgttaatatcctgcgtaatacctcggaagattcagagcgcggagtcagcttctttcctaacaattggagcagagaagatatgtttgcctacgctcgccgcaatctttcactaggaaagaaatatttagaagatgtcaaatcgcttccgatccttcatttctgtaaaattccgttagcgcttgctgacggaacattaaacgccttgatgaaaggaaaagaaaaaatgacgcgtgacgatgtaaataaaacggtaaatgaagttgtggatatgtaaaaacaaaagcacggagcccctgggttccgtgctttttatatttccacctgcagactttcatataaagcgacgatttccccttgaataatagggtagtgtttcagggtcggaacacttgaaagctttggcgctcgtttttgctcagctgctgcagctagctgagcaaatgtttcctgaagctctcgtttctccgtttctgacagctcatatccttcaaacgaagcaagaagcatataacctaactgctgtgtagcgacaactgcaggccacaacccttctagtttgacggccgttttagaatattctccaatcacattgtcgtacagcgcccgaagattaacgagttctccttgaagcttatttctttctcgtttaattctttcttcatcttgttcggtgcttagcatttctaaaaactgtccttcttttcgtatcacatctccaagtaaatatggcaaacgaagcgaagaagctcgtttgaaaattaataccgtgccgaccactccaataacagaaccaatgacaatatcaatcactctagcagacgtaaagtagctaatcgctttatccggatgaccgctttcagcaattaaaagagcatttggtgtgataaagagcgtgccgagcgcgtagtttttgacaattacaatttcaatcgttgactgaagcacgaagacaatgagcgcaatgacgattcccgttggttcaagcatcaaaattccggttccaattaaaatacctaaaatagttccgacagagcgctgaatacctcgctgaatcgttgcacgaacggttgctccaagcattactcccgcgcacgtaagcggaatccagtaagaccttggaatatttgtcgtgtaggcaacggctgcggcgatgatcataataattccgtagcgcaaagcatttttaagcacatacgaacgtttgtgaaaagcagcttttaaccgtgtttttacgctgccttgtgaaaattgaatatactctgtttcttttaattctttcatttgaagaacgtcatttacatccaatagcaatgtacgcagctcttctttgatggacagctcttcaatttcttctcgaacgtctcgaatttttttatgcttttttaacgtggccatttcggatgcgaacgtttcaatcaccgcctgtgcttttttagaaacagctggattaaaatcgttcgcagcggccatcacaaagataaatagcccttcggctttttgatttaataaaaacagacgatgcgcaaacgatgatttttttcgattaattttcgcttgtttcatcgctgtttccgctgctcgaagctcgacaaccgttttatgctgctcggcgtgaaacgattccgtaccaagagacccgacaaatgaagctagctgcctatacgctttcgccacagcggcagtttcaggtccgcgcgggttaataagccagccgctcatgctaatacaccaagatagtgtccctcctaaaaaaacgagtcctgcgtgcaaaaaaacagcctgcaaattcggcgctggaatgcccgtgctcacagcaaatgaaaggacaaaaaacatggcagaaggtcctggaatttttaacgctccgaaaacataaaccgatacagctccaataacaccaaataaaatagttttcatccaagctacgtcagcaaataacgagccgagtgtaaagcacagtgtaacgccaagcaaagctaaaaataacttaacgccacgctgcgcataaggctcatcttttgtatacaaatatgtaaagccgccaatgcttgcaatgagtccgtactgcaaatgatcaaacaaaatccctatcaaaatcggcaggcttgaagacaagcctgagctgattcctcttacccacggagaagaagcgtggttaaagcgaaaagcggctttgattcccggcgcttttggagaagcctcaattttatgatgaatttccgtatgattatatgctggtgaatttttgtcatcactcaccttgacctcctcctttctctccatatatctttcctgttcttaaaacgagataaacctaaaaaaccgctgttcctatccgtattgtgtttaggaacagcggtttttatccttataagcagcgtacaataaaagcaaaaagcagatgaaacgaatgtctcatctgctttttactaacagctctactgcttcttttactaagttttcggtattctcgcctttttcaatactttctcttacacattgttcaagattggtgctgacaataacacccatcgtgcgatcaattgcgcttctggctgctgagagctgtgtcacaatgtcacggcagtcttttccttgttccatcatatttaagacaccttttaactgaccttcaatacgttttaaacgatttttaacttgcttatcatattccatcatactactacctccgctcatgcatgattgcgcttcttgcttttaagctgtacgcaagaagtaaatgtatacacaactttatacctatcagggtatgatgtcaagtaaaggaagtttaacataaatgttaatacttgtttacaccgtatttattgtcttgtaatctaaacttagcaatctgagagtatagttaagctgtaaaaacgacttacactggaggtttgagatggctacatacgggaaaaaattaatagcaagtctattcatcatggcatgtattttagggtttatgggacatggagcttttttagctcccgaaaaaacggaagctgaagtaaattatgatgcgacactttattttccgttagaccgatatcctgaaacgggtgatcatattcgtgacgcgattgccgctgggcactcttccgtttgcacaattgatcgcgacggtgctgaagcgaaccgagaagaatccctgaaaggatatccgacaaaaataggttatgaccgtgatgaatggccaatggctatgtgcgaagaaggcggagcaggagctgacattcgctatatttcgccttctgataaccgtggagccggctcatgggttggaaatcagttagaacagtatccagatggtacacgcgtacaatttatcgttcaataatagcagaacaagctttactttgaagaggtgaaatcatgaaaacaaaatggaaagaacaagagctaaccatgtcttatcatcagtttacgctgtttcaaaaaggacagccaaagccccatcacgactggagcgatgaagatattcaaaaaggatatgtcgcagacgataaagctatttcatttgaagccgtatcaaacacaagagccattattgaagtatgggtaaacgaaactccagacgcatcaaaagctgaaaagaccactcgccttccttttcacgtcgaaagcgatgggatcgaaatcaaaagcgtcctatctgaaaccttaagctatgacattccaaacgggtattattacgtcacatgcctgactattcctcttcaagaaaaaacaaactcaggcctttatttagtgaagtatttgctgcattttgaaggtcaataaaagaaggcagccagtaggcttccttcttttattgaccttgatagtcataagtttctttatctgatataaacgggctgatttcaccaagtgagaacaagtgcagctcatgcatcgctcttgtgcatgctgtataaaataaatttcgctcatattcatcctggtaacattcactcgatgcattgtaaatgatgacggcatcaaattcaattccttttgctaagtaagctggcagaacaagcatgcctttttcaaatgaacttgtttcttttgtcagcaaccttgcagacatcgcttcaggcagtgcttggaatgcctgaagactttcctcagctgttttggcaataacggcaatcgttttatagttttgctgcttcaattcattaattttgtgtatgattgcctcatgaaggtcttggacgttatgtgcagccgtaacggttggcttcgcaccgtctcgattaaacggctcgattaaatgaccatttgccaccatatctcttgaaaactcgacaatttgacgtgttgatcggtagcttctcgtaagagtcagcgtttctgcttctttctcttcgtacagttcgcttgaaagaatggtcggtgcgttcaaggcgtgcgcatagatcgcttgattcaagtctccaagcagcgtcattctggcatgcggaaacagctcttttaaaaacgccagctgaaacggtgaatagtcttgtgcttcatcaataaacaaatagcgaatgacaggattggctttgcgtccttcaagttgatcttttatatataagtaaggcgttacgtcttcataagacagcttcatgttcatgacactttgcaccgtgtttttagcagtgtcttcccatccctctacatgtagaaaaaggtgactcctttcaaacagctgcatatagatacgtcgaatgtcgataaatttaagctgcttgatcgcctgcttaataaatttcattttcttagctacaacggctttggctaaatacgcttgttcccggtcgaaatcatcaaatgagctttccgtatagccttcctttttctgcagatgctgataggcctctacataatcttctttttctaagagctgaatttcttcttgaacccaatcttttttgcgctcaagtttttcaagctgattaatgagcttaagcgcccactcagctacgagctgcatcctgttgggtatggaaattaccgtatcaagcgaatagaaataagacagcaaacgccgagcggataaaacaatttcgccgcggaacttaatgtttttaaaaatgatgtctttagtagacagttcttcgatatacgcatctacctgctttttaaattcacggcttgccttgtagcgaatttcctgcattttttgcttttttgctgcggcatctttttccgttagcaaatattcgatttgaacgaataagtcctccacttcaaactcgtttcctaaccggccatcggcatattgctgaaacgttgtttgtttcatattgtcttctccaagctccggaagaacggttgagacgtagctgttaaaaagcggatttggtgaaaacagcatcatgttttctgcagtcagctgctttcggtgacgatagagaagataagccacgcgctgaagagccgcagacgttttaccgctccctgctactccttgaacgatcagcactttatttttttcatttcgaataatttggttttgttctttttgaatggtcgctacaatacttttcatttgactgcttgcattatgtccgagcacttcttgaagcagctcgtctcgaatagtaattcctgtatcaaacatgcttttaattacgctattttcgataataaactgacgctttagcttcatctcgcctttaatcgcttcacctggcgtttcgtactgcgcttttcccggtgaataatcataataaagactcgaaataggcgcacgccaatcataaattaaaaactcttcatctttttgatccattaaagagcccacgcccacataaatagcttctgcttctttttcaccattttctataaaatcaaaacgtccaaaataaggggattgcgttagtttttttaatgtttttaattgatcatacgcttgtctatgggtaatttcacgttcagctaaaagttctgcctgctgcttaatgctcgtaaatgtctcaatcacgtcatctggctcatccatattaaccgtaacatcgtcccaaaacgtgcttcgcaaatcgacaatttcgccttttacgtttcctacgcttttacctattttttcagctttttggctgatttcttctactacccaatcaactcgctgctgttcttctgttaaatttttgtctttcacttatccacaccccttacacacgttacccgataacaaaacttgttaccgggtaaaagcgatcgttgtttatttttttcagagtctacatacttccctactgagttcgtaaatccctgctatgtaaccatattatgtcttaatttccaccgttagtatactgaaaaataatgaactccacaacaaaaagggctgagaaagtctcaagccccttatctttataggtcgttcctctacttattagctattactgtttccaaaaagttagcagatgaatgatggctgacaccacttctaccccttgaaacgccagtaaacctgctgctgccgctgtaaacaatccgactaccgcttctttaaaaatgaatggcattgataccagctcctttgcttatttaaaataagtagatttgttatcattctactccttttttcagaattttcaatacctttttatcaacaaaacaaaataaaaacgctttcactttataaaaataaagtgaaagcgttttttaagcttccttttctaatgcgttcagcgtaagtgaatattctaatccttttcctttttgcacaatgtgctgcactttgcccatgttgcacgcttcttgcgcactaacggtcatgccgtttgttaacttgagctgcacaggttcttccgcaattcgtacgtcgcatgctaaagctaactcatatcctccgccaaacgtaaagtttgtaagaagcgcaatcgtttgtttggagctgcatgaaatacgctgaaaaatcgctcgagctgttactgcatgaattggctgataaagccttcctgtttcttcacgtaggaaagaggctgttctatgatctccgttcattttatagtactgtcccataaatacaatagatccaaccgacccatcgtgctgcagctcattcatcgtttcttgcagctcatacatgacttcactgttcaaacgattaagcattgactgattcattcgtacaaccgccacatgatttcttttttctactttgataaaccttttcatcgttcctccgccctttcccctgttgttctttataaataaagcgctttcaaaaaatccgctttttaatagaaaagttattttcatagtttcatcatacaacaaactcataattatttccattacttttttaattttccgtcaataattctataaatcatatccatgtttttatcaaataagacgtgctatagtataagcagcacaaatgcagctgaactcactgataaaaggagtaatcactatgaaatacgacttaacaaaatgggagcctcacggctattcttgccctgtggaagcagccgttgatgtagtcggaggcaaatggaaaagcgtcattttgtatcaattatcgaaggaacgccggcgctttaatgagctgcgcagactcattcccggcgtgacgcagcgaatgctcacgctgcagcttcgcgaactcgagcgcgacggaatcatccaccgcgaagtctataaacaagtcccgcctaaagtagaatactatttaacaccttttggagaaacgctcatccctattatcgagctgatgtttaaatggggatatgatcataccgataaaattgctgaagcaagaattcaagcagaaaaagagtaaggaatgagaaacgatatgaataaaagaaaaaaattccctttaatctccccttttctttcgctcaatttagtaaatactgaagccgtcagtcatggccgtcgtcacgagttactaagtgaagaccaagatttattagactggcttcatataatgtgtgaagagatcccttctcttgataaaacaatattgactatgtctcaaagtgaattaacagaagtgttacatcttatatatgattttcgattgtgtttaagaaacaactttgaatcaatagcagatggaaattccattgataataagtggatattatctttagaaagaaatattgaaaaagctccttatgtttttaaaattcatgcacagcaattggtacaaatcccaaccgggagcatcgtaaataaactcttttccttactatcattagatgctttgcagttaatcagtgaaggccaactaaacaaaataagaagatgtagcaaccctgactgtgtattgttatttattgatacaactggaagacgtaaatggtgctcgatgaaaatctgcgggaacaggcaaaaagcggcgcgttttcaagataaaaaggataggggtgaaaaataaccattaaaatcattattgacaggttaatttataaagagttaaaataattgaaaaataaaggagtttttatataaagatgaatagttcacctaaagcgtcggcaaaagaagacatttcatatacgcaatcatatttttctaaaatgataacgaccgcgagaagccctttaaaaattgacgtaaaagatgcagttacaggcttagtcggtggaacggttagtattttacttctagctatactgactcagcttacatcaagcccttggcttatggccccttttggagccagctgtgtattagcatttggactttggaacgctcctctatcgcagcccagaaatattattggagggcatttagtagcgactttggtggggttaaccatctatcatttattcggtaataacccttacactttagggataggagtcggcctagccattttctttatgatgcttacaaaaacaactcacccacccgcaggagcagaccccattgttgtgatcttgggcgcttcttcttggaattatattatcaatcccgttttaataggatcgattgtaattgtaatcgttgcccttcttataaataacgtacgaagtaacaggtcgtatcctacctactggatataagaaatttgctgataagaattcaaaaatttataagaatagtcgctagagtgaatctacataaaaaaaagacttcccacaggtcagtgaaattgacctgtgggaagtcttctttatacgtttttacgaatcaataattcttttaacccgtacacaaacgtgctttcaattggctttaactcaaatgacgggctccagtccatctgcggatagcggtcaatcagctcggccagcataatttttgcttctattcgagcaaggggtgctcctaagcaaaaatgaatgcctcttccaaatgccatgtgcacatttggctttcgatcgattttaaatacatccggatcttcaaaatactccgcgtctcgatgcgcagatcccatccatggaacgacgtgttcgcccgcttttagtttcttgcctgcaagagtcacatcttcttttacgattcggtgaagagcctgaacgggtgaacgatagcgaagaacttcttcaatcgcagaaggcaaaagttctttctctcgtttgagtcgttcaaaagaagctttatcttccattaaacaataaatcgtatttgaaattaaatttgtggttgtttcgtttccagcaatcagtagcaaaatagaaaaaccgacgatctcttcatccgttagctgtttcccttcttcttttgcctgaagaagcagggagataatatcatctcctggacgcgtgcgtttttcttcaatgattcgataaaagtaagtttctagctcatcatttgctttcattttctcttgctggagtttttcgagcgtttcacgttcgttattagaaggaccggctacgataatatccgaccaatctttaaactgacgctgatcttctatcggcacgcctaaaatatcggcaattaccataaccggaagcggataggacagatgctcgactatatcaatatcttcaagatgctcaacttcttgtaataattcatttgtaatacgcgcaattttaggctcccatgctttcattgctttaggcgtaaaagctttattaacaagcgctctcatttcagcatgcttaggcggatcaatattaattaggctcgttcctagagcagtttgtctttggttttgtggaggtcttcgatcagaagaaaaaatattcttttgttctaacacttctttgaccccgtcatagtgaaaaacatcccatacctgccttttttcatcccattgcacaggctcggtgtttctcatctcttcataccatgaaaaaggattaaagcgttcttcttttgtttgaatcgtattcacttgacggacaattccgttttctctttctgttttcatgttaaaacctccccgtatcgttcaaatagaatgactatctagtcatctatgaccaaatagtaccatatatacgaatttccttaaaaatgatagctgtatattttaataaaaatgaatcgatagaaggatatattttacaaaaaagggtaggcgcatagcgcctacctttttaagaataatgttcttctggtttttgtaatcggttgtctaacgcgtacgcgccgcttcctgctagaatcatatgaagcgaaacgacaaaaagggcaacctcaagctcatagccgcctgtaaaaccagcaccgcttttcgctgtaaaaatagcaccgatcatcacaatcgcaaacaagacaccgattaaacgcgtttgaaatccaagaatcatagcggctccccctacgaattcaataaccgcaaccgcataagcgaaaaacgcaggaatgcccatgctgtggaaaaaaccgaccgtattatcaataccgctttggaatttgccaagaccatgaataaaaaacgttagccctaacataagacgaagtaaaaacgttccaagctgatagcttttcatttcttttcctccttttttacttttgtctgcacatgtaacaattttagttacaactgtgaacaaattcaaggggttagaacagaaaaacaagatatcagcaaatttctttatctcattttaaacgtttcttttgaaagtaaggcaatactccctgctcagtcaggctgaagataagagagaaaagcaaaaatatggtcatgaataatgagttctgctgtaggagaatggttctttaatggcaggtgctcagaatatcgaaaccgattgaatttatttacgtcaacatggtgaacggcctgcacatgaaaatcttctattatcgcttttacttgagcaaaaggcggcatcacaagagattcggttccgattttttgcaggcactctctgcttatggcatgaggaacagctgtcatcgagctcattaataaatcttttcttcctaccgtttcatttaacacgtacttccacccctgtacaacatgcgtgagcttcgcttcatcttcacatacgtttaaagctacatcaacgccgctcgctaccgctgaagcaaacggatacaactcttgagctgaaagaacaaaatccccgtctataaaaagaagaatatctcccgttgctgcaagggcccccgcagctcttccgcaatcgtgccctaaccgcccatcgtagacgaggattttgacaccctgttctttggcatacgcctccgactgatcagtggaaccgttaatcacgacaatgatttctaacggctcaagttttcttgcttctgcaatcacttgtttgattgtttgttcttcgttgcaaaccggaacaataacagacagctgtttgcctccataaaaagaagataatttcccccagccgtgctcaacaactggaatgggctgcgcaagcatatccactcgccttttacgatttgacgccagcgtatagtatgtttgaagaagctgctggtaggattgaattcgctctttgctgcgcagcgggcgatcaaatggacgaaagcttcctttcccctgtgtttcaatcgacatagacatacttacgcggtactgtgttaaaaatgtcacaaataacgaaagaggcggcagctcccagtagttcttcaacacgtttaacagcaccccgtaaggcgcttttaaataagcgttggcgtggtgaggcttcccaatcgcatgatgcataaccgtactccacatcagctcgctgcggttaaaggcattcattttcattttcccccacttgtttagcaccacatcgctatgttcaaataacagcggctgaacaaaacgctcgagctcggaagctgaaagaataatgtctccgtctacaaacaagacggcatctcctttggcagtctttgccccttccattctcgcttcatgtggagacatacgcttttctattacttttaccgtacacccttcttctttcgctatttttactgaagcatctgtacagccatttgcgaccacaataatctcaagcacgttcacttttttaatttgcttaagcacgttttttagcgtttcttcttcattgtaaacgggcagaacgacagaaagagttttcattgatatcccccctaaaaaaagaaccactgaacaattcagcggcttcattcatttaaaatacctcttgtatccacaactttttttgcgtattttacaatcgaccaatcgatttgactgtgatcggttaacacaagtacaacatcgctttttttaacttcttcttttgtcagcgggacagagaaatacacttgcttatttaatataacggagtcaatgtaagggtcatgatacgtcagctcatatccttttgctaaaagaccttcacataccgtcagcgccggcgattcacgcatatcatttacgtcttttttatacgccatgcctacaacaaacacgcgtttctcatttgctgcgagctgcttttcaacacgtctaattactttatttggcatttcttcattaatatgatgagcagcttcaataagttcgcttgttaacccattttgctttagtttccataaaaaataaagcggatcaacgggtatgcagtgtcctccaattccgggacctggataatacggtgtgaacccaaacggcttagtagatgccgcctgtaagacctcatgaaaatcaatccctaattcctcacacagttcatttgtttcattcaccaacgaaatattgacaaggcgctgaatgttttcaaacagcttgcacatttccgctacttttggagaagaaacaggtacgacttgctgaaaaatactttcataaaacgtctgcacgtgataaaggcagtctttgctgtagccgctaatcacttttggaatatactcaatgtcgtacgacttgtttgctggatcgactcgctctggagaataagctaaataaaaatcaactcctgcttgcaaatcagactcctttaaaataggtaaaacgacttcttccagcgtgcctggataggtagagctttcataaataacggtttgtccttttaccatatattctttcaaaaacgtagatgcgctaataacgggtcctaagtccggattatgattctctgtaataggagttggcacggtcaccactacataatcgcatgcttgaaatgcggaaatacctttttttaattcatatgcttgaaagtttttctctctttgaatcacatcattacgtacgtctggaatatagctttttccttgttttagcgcttcaatttttggaacgtcaatatcaagtccaatcacggtgtagtttttcttagcaaacaaaagagcaagcggcagtcctacataccctagaccaataacggcaacttttttattcattcttcaacacctcaaacaaaagatcatgtcttcgtatgtccggaagaaattcgcctctttcgctagtttggctaatatagtacgccatggcctctacataatctcctagaattcgctgagttgatgctgctagacctttgactttcatatgctcttttcgaatccggttcgttcgcgccacatctacaaaatgaacaggatgaaccgtaaagccgtacatgatactttttaattgaaataaaggtggaatgataagagaatcatagcccactttctccattacatcccgtttaattacatgtggaatcgccgttgttgtattaatcgttaaatcaggacgtttacagacaaggttcagaaaatatttcgcagcacttaccgagtgaataggatgcacttcgtcaagcagacattctaaattattaagcgctacatcaatgccttggtcagctgcttctaaaaaccgccgtaaatcttccgcggaaatcacaatgtctccatctatgaacaagcaaatctcaccgctgctgtacatcgcaccgattgctcgaggtacgttatgcccaagccgctgcttgtaatgaagaacagtagcaccctcttcaattgctcgcttaaccgtcacttcgtctgctccgttggcaaccacaatgatttcttccactccggctttttttacttctttaataacgtttgcaatcgtttctttttcttcacctactggaataacagcactgtacttaacgcctgctttccgcttcacgcttggtgtataagaggaaacaacgtctcgatttcgatcgccgtctgttagtccgcctcttatgcctttttcttcgataagatgagctaacgctttaatgtgatctccaataatataattagtggaaataggaaaaggtgaattggtaggaattgttttgtgggtggttctaatcttatttgtataaataacgtctgaagaacacggtgcaacgattgacattccttttaaaagagcaatcgtttgagcgagcgggggatgagctaaattctcatatccaatttccgcagccgatgttttttttatggcatgaggaatggctgttaatgcttgaacggataaatcttcacgctgtaagcataagttcagcatgtatttcgcaatggaaacagaatgaggacgcacctttcgtttcataatccacgtaaggtcgtttaacgctatatcatgaccggtttctatagccttcgtatatttcatcagctcctcatgaggaaccgctatatctccgtccaaaaaaagcaaaatgtctccttttgcttttttagccccaatggctcttccgatattaatgccaagagcttcctcataataaatgacgcggcagcctgcatcctcggctattgccttagttgcgtcactagatccatttactacgacaataatctcaaacggctttattttttgagcttctttaagcaccggtaataatgaatcttcttcgttacaggctggaataatcactgatactttcaaactcactcaactccgctgaaaattcgaacatacgtgatggctactagtggaatggttacgtccgttggctcaccatatgagcttgatgtacgtacaacagccgctgcatccgtaacagcaagcagtgttccattaataacgtcaatagctgtgatgatttgcacaaatgagccaacattttctcgtaatgtatcttgaaacatacttttctctcctttcgtttaagcgccttgaatagtaacaatgcttgtaaatggaagtaatactgttgatgttggagactctactaattctaaataatcatctcctacaaatgtcacgacaccttctagtggaccagccgttgtttcaatcacaacttcttttccgatatactgctcggcaatttctttaaaaggtgattcttgagattctttaataatacttattacgtattctttgaacgtgtcagaataaacgacttcttctactgctttctttgtgttttcctgaataaattcagcaaatcgatttgaaaacaacaggtgttttatcttttctatatagcgacggtaacaacaaaaaaacataaagtttgttcctcctttttatactgttatcccttcaaattacctacaacaattgacgtaacctaagagattactttatcaatatatacaagctttatcagaaaggtgacagaacttttattatatttccatacaaatacgcacatgactagcccgttttgcatatgattacttcctacttcctcctacctactgaaacctaaacaaaaaaaagacaaagctcctaagctttgtcttgtcttatctattaaatgaagaatcagttggctgcaatacgctttgctcctatatagcgctctttccaatagcttgaatttttatcgctaattgtcacgcctttagaagacgatgcgttaataaattttccgtctccaagataaatgcctgcatgagaagggccttctttgtacgtttcaaagaacacaagatctcctacctgcggttcacttacattttcacctgatttatagatatcttcaaccgttctgggaatatcaacgcctacgctttctttatatacatactgaagatatccgctgcagtcaaatcctgaaggtgtagtgccgccccatttgtacggcgtgcccattaaggattttgctttgctgattactttatccgtattcacttctgattcgccttctacaacgccgcctttacctaatgcattgtatgtattctctccaacaactccatctgcttctaggttatgtttctcttgaaaagccataaccgctttttttgtttcataattaaaataacgcgatacttcgccttttaaaaatcctttgtcttttaacaccgttttaacttgttcaacatcatcatttgtcatcccttgttttaaaaccgtgtcgccaaacgcagcatgtcccattgccggacttgcaaataaagctcctcctacaagaagcgccgatagcatttttttcatttcgtttcctccccgaatcatgttttaagcaccgtacaaccataccatctgcggataacaattcaattaatagaagataacaatttgataacaatcttcttaaacaccctcaactcttggatgtaaaacgccgaaatataagaagaagagaaaaacaactattctagcaaataaaggtgataaacatgaattggtttaaacgaaacaaagcgcacgccgaagcagccgctgtcgaatccatcactgtaaagcttcatgtatcggacccgatgataaaaaagcagattaacatgatttccttaacagcagaggatctcgaacggattgccggatttcaagttcacgcgctaaatgccatcgaagagatcgtgaacgatttttacaaagctattggcgaacaggcccatttggttgcgattatcgaaaagcacagcagcgtccatgcattaaaacaaacgttaaaacggcatattttagaaatgtttgatggacaaatagacgatgcttttgtggtaaaacgtcaaaaaattcccaagatgcacgttaaaattggacttgagccaaactggtatttgtgcgcatttcaaaatttatttacatcacttctttcagtatgtgaacgtaggatggaatcaaaagaagaatgtctggcttttattgcaagtatgacaaagcttattagtctagaacagcaaattgtgttaaaagcctatgagcttgaatatgacgagcagcgggctggacttcagactcaaaaagagaaaattcagctagaaatctctcgtacatcatctatcctttcttcgctatctgaagaaacgaagacatttatgaatcaaatgcacaaccagtcctctgacgtcgtttcttatgcaaacaaaagctctgaactagcagaagtcattgagaaggaatccgttacgagtcaagcaaaattaaaagaagaacaaaacatgctgggaagcatacaaaaaaatacgtcgctcattcaaaacaaaatgaaaacgctcgaacatacatcacagcaaattcatcaaatcgtttcgattgttacttctattgcggagcaaacgaatttattagcattaaacgcttcgattgagtctgctcgagcgggcgagcatggaaaaggatttgcagtggtggcacaggaagtacggaagcttgcagaagaaacgaagaaatctattgctaatatttccacttttatcggagacattcaaaaacaaatcgaaagcgtctcggcgctaggcggagaagtcgctacattaacaaaagatacggctgacaatatgaacaacattacttcttttttcacgaacgttcttagcataacaacggagaacaaacagcaaaccgtgctaaccaaaaaagagcttgaaaaaatagccgatgtaatgaagcagctgtctctgcgtattgagaagatggcccattcctcagaagaacttgaacggttaactgaaaaaagttgatatgcaaaaaagccttctcagcttgcacaagaaggcttttttatttttttaagctagcagcgggctcttgagaagaacgctcgataaactggacaaaatcctctccgtatatgcttcgaatcagagccgtcagctcaacaaagtcaggcagctctccgtaaacatctcgcagcggcatcgctccttgaaacaaaggattttcaagaggattataatcctcgagcgtttttaaaaacatcttttttccttcttctgtgagctgtacgtatgtattccgcttatctttctcatttttagaaagggtaagatagccccgcaagtgcaatttttttgcaaagttaaaagctgtggataaatgcatgacgcctagctttgaaatgtcagtcatcgatgcaatttccagctgataagcaatccccaaaatgtgatgctcattaatgctcagatcgtacggcttaacccactgttcccaatccttctcagtagacttccaaagagctttgcttacttgcatcacaagctggttaaacagcatggcatctttaatcgtatcttgatttaacgtgcgtttcacctcttcacttcctctctagaaatgcaaccgttcacatcattttcccctaagactttataaacaaaaagaatgaaaatatatacaaaatattatacatgattgcttatatatttcaacttattttgcataaaaataaatttaaacgtttctttatgtaaaaaaacagacgtgaacgctgaacgttcacacctgttttttaatgaatataccgtttaccaaccagaaggtttgaaataacgtccgttggaatttcaaactcaatgtttcccatatatcctggggcgactttgtatttatcaaatacaattctaagcttgtgatcttttgtaatgtagaaactttgattttcagcaatctctttaaaaggatccatatcttcttcagtcagccagtagattttgccttcttcatgtttcatttgacctttcatttgctgtttaatattttcactaatgacctttatatagcttttatctttgaacaaacttggaagcgttacgagcacttcatgttttttatcaatcgtgtcgtactgattgatgctcgacgttgaagctctcgattcttccacatatcgatgaaccacaagcaaatcatcggtatccgtcataatatcatagccgctgctgacagccacgtttcctttctctcctttttgtaatgttttcatctcttttttaaactgttcatacagctgctcattttcttttatatacttttcattcaagcttgtttgaagacctttgttttccaagcctgaaatcgatggtgttttcacgtcaatacgagaatgcttttcttcttgctttagttcatcaaatgtgatcacttctactacttttccaagcacaggaatttttgccattgcatttgccgcatctggactcacattcactgttgtgataaaaatcatcgctgctgccgcaatcgcgctcggccaaatataggatttctttttacgtggatgtgaagaaagtgcctttgcaacaacatcatctaattcctctggaataggaatgtcatgatactgcttctttaacttttctattttatcattcattgttctaagtcctcctccgtcatcgtaatccgcaacaggttcaaccctctgtatagctttgtctttaccgtatttacattttcctcaatgatttccgcaatttcgtccatttttaaatcttcgaaaaaccgcagaataataatggttttatatttaaccggcagctgatccattgcttgctttaaatcgatatcttcatactgatcttcacgtccgctgctcaagtactcaagcgcttcatcgtccataagcgttaaacgtttatgcttgcgcaggaaatcgattgctgttcgtacaacaattttataaagccagcttttaatcgattgaatatccttgatattgtctattgaaatgagtgcttttttaatcgattcttgcataatatcaagcgcatcttcttgattttttacatagctgaaagcaagccggtaaaaatccgctttatgctcggttatgcacgctacgagcatctgatgtgcatcatgttttttcatcatctttcatacccttctattttctcttgctgaagtacatctataaggtagacggaataagtagaaaaatagtttggtttttttaaaaaaagtaaaactaaatgatggtctcatgcgtctattaggtagatatatacaaaaaggggaatattactacatgaaaaccatgggctacaaacgtattttgacactgcttggatgctgtattttgtttcttggtacagcagggtatatcgtcaaagcaaacagtacagagaaaaaaacggcaagtatccaaacagatcaaacctatccaaacgttgaaattcaaacgctagttaaggaccttaccgacggaggctacgccattagctacccttcctttggtaaaaaagaaatcgatcaatacattcaagcttacgtaacagatcaagtggcacactatgaaaaaaagctgaagaagctgtcaaaaaagaaaaaatctgaattaacgattacatataaaatcgtccattacagcaagcaaacgctaagcattgtctttgatgaatatgaatcggtaaatggagagaaaggaacgtcttctctcaaaacctttaccttcgacctgcctgctcaaaaacaaatgacgttaaagaatttatttaaagaagatgcaaactacttagatcgcctgtcggctatttcatatgctgaattaaaaaaacaaatgaaaacagctgattttgaccctgaccttcaaagaggaactcaggcagctaatcaaaatttcagtcagtttgcgctgcttgaaaacagtattgtgatctattttaagccttatcagctaggtgctgaacaaatgaaaaccaaaacaatcgctatccaaaaagatttatttaaagacatgctgagcgatgcttacaaagacgaagcagtaaataaaaataaagtcaaagaaacgcctccaaaacatatcgttaacgaaatgccacagcaaggagcgcctattgatccaactaaaaaagtcgttgcgatgacctttgatgacggacctaacccttcatctaccaatttgatcttagatggattaaaagaaatgaacgggcacgctaccttttttgtgttaggaagtcgcgttcaatattatcctgaaacaatcgaacgtatggtcaaggaaggcaacgaagtcggaaatcactcttgggatcatcctcagctcacacgtttgaacgaagcgcaggtcaaacaccaaataggcgatacccaagcgctcatcgaacaagtgagcggctatgaaccactgcatgtacgccctccttatggagccgtgaacgcaaatgtaagacgttatatcggaaatgttggtgtgactctatgggatatcgatcccgaagactggaaatacagaaacgttcctcactccgttcaagcggttatgagccaagtcggagacggaaaagttattttaatgcatgatatttatcaaacaagtgccgaagcagcggttgaaattatgaagcagcttcacgcacaagggtatcaacttgttacgatttcacagctagaacaagtaaaaaaagagcgggagcagctgcatgtgcagtagcagatagcaggcgaacgcgctgcagtcattaggatggctgcagcgcgtttgtttttttatgcgatgtttaataaatgctatacagagcagcataaacggaatcactacatgaaaagggataaaaagcaacactggcataatcgttagcccttcttttaaatgctcttgaaaattacttgcaatcgtcaaagaaaaaaataaaatcaccctgcccacaggatatgtcagcgcagaaggtcgtttcgccttaaacagtgtggaaagtccaacaatcacggcgtaaaaaaagacgctgattttaacaaatcctccgatgactaatgcactcataaaaaacacgtccagccgttctagctattacttcaaatcctttgtgcaccgtataaataattaacagcatcagcatcacattcattacaaataaaggcctgtcgcttgttcctcggacgccgaaccttctgtttcctttttattgtctttgcttttttatttttaaataaagaaggcacgattaaaaacacctttttttagctttttccaaataaatgctttgtatgcaatttttaatagagcaatcaaagcgtaagacaaaaaaataacaaaaactagcggtagaatgtttttaagaaaaaaacaaaaacggagagtgaaacgtatgaaaatcgtttggacatcagctttgctgttaggatgcttaatgggattttctatcggagtggatatggtgcaaggatttagtttttccatggccttgcaaaatgcctacagtccgtttcgtgttatggagttcgctgaactatttgtcctttttgtcctttttttacttttgttctgttttgtagctgaagtattttatcgttcatttaaagtaaaaaaagcaaaacagcgacaaaaataaaactccgtaaaaaacacatatttctcctttttaccacctattctccttctcatttaaatgttataattttcataattggaaaaacttttacacgcctttctacatagaaagctgtacgcttaaactacaaaataaacattgactttgaactaaaaggtgaagaaatgatgaaaaaaaaattagccgttattagtacagcttgcttacttattcttgcaagtgatcccatcccttcttatgctactcctgattccccggattcctcttccgacgttttggaccagtcaacagacgtggatacaactgaagatgtaaaagctatttttgactctctctatcaagaaggctattcgcttggagaagaagatggatacgcagagaaaaaatttgaacagtttgatcaaacaacaggactggacaaatcttctgaagaattcacgtggtttatgatgggatatacggtaggatataaaaaaggacagcagcaaaaagaggaagaactcaagactgaacaagaaaatgaaatggctgccggcgaagaggaaggctatcagcaaggcgtccttgattacaaacatgctactattcagtcagaaatcgaccctttcccttctaagtcatccgactggaataaagggtatgttcaaggctacaaaaaagctatttctttaatggacttatctgttaaagcaaaaaaagaaggctatgaccaaggtcttgaaaatgattcaatgagtgttccgagcatgtatgatgatgaggatgtcacacgtcaggcttttacagaaggctttgaagccgctcaagccgaagtgctgaagcaacaaaaaaagcggtttgaaaagcagggctacgtacaaggctatcacgaccttccactcgaagtacctgcagaagcagaaggcgaattgcaaacagcctttgagcaaggatatgaaaaaggacagaaacaaaagcaaaaagacgtaaaagcggacggatacgactcagctttcacttatcagacctatagagcgcctaaaagtcttcaggacaagcccgagctagaaaaatggtacaaagcaggtttttattcgaataaagatgtgaaatctttacagcaaaaagcttataaagacggctggaaacttggaaaagaaatgagcgttccgaaaaaatacaagcaaaataaagctgcggtggcaatgtacaagaaatattttgaacaaggtcaaaaaaagcaggataaaacagtgagtcatatcctgctcggcagcggtattgttcttacactggttgcccctatcacactatggaggctccgccgacgtaaaaatgaagagacaacactagatagctaaagacaagtacataaaaaacccggaaaatcacgattttccgggtttttatgttaaataatcattcgtttattttccgcaagctgaacttcttgctcgtgttttgactgattttgttttcgaattttcaaataataataaacatagcagcctataaagaaaatacctccgcagtataacgccattcgctgctcgggatcaaacgcaagactgatcataacaatacagttcgtaataagcgctacgataggaagaaccggataaagaggtgttctaaatttcagatcttctacttttccacctttagccacgtaagcacgacgaaatgcaagcagtgaagcggtaatcgcaatccagccaatttgagcgccgagtccagcaagtgaaatcagccatacaaaaacggttttagctgccactacgcttgaaagcaacgaaaaacatgaaatcacaagcgtaattaatagtgcattaaacggaactcctcttttgttgacttttccaagcgcaggacttgccattccttctcttgaaagagaataaagcatacgtgtagccgcgtaaaatccagagtttgcgactgaaagaagagctgttaaaatgataaagttcataatatccgccgcgtaaggtacacctacactgtctaacacaacaacaaacgggctttctacgacgcctgctttttcacgaggaatcatgcttgctagtacaaacacggataaaacgaaaaagaaaagcgtacgccaaaccgtttgcttgatcgcttttggaattgttttttccggattttcactttctcctgccgcaattccaatcaattctgttccttgaaacgaaaagttcaccgtaatcattgtaattagcaaagccgttacaccatttggaaacagcccttcggcaaagaagtttgatagaagcggtgcttcctgtccgcttttcatatcaatgagtccaaacattgccgctccgcctacaacaataaacataatgatggcgaaaattttaacgcttgaaaaccaaaattctgtttcaccaaatgctttagctgaaagtgcatttagtgaaaaaattaacgctccaaaaatggcgcaccataaccaaacgggcgagtctgggaaccacctttgcattaattgtccggcagctaagaactcaagtgccaccgttactgcccatcctagccagtacagccatccaatcgcaaaaccggttgcagggccgataaatttagtggagtatgtttgaaacgatcctgcaactggcatagcaacggataattctccaagacacagcatcgttagatacataatgatccctcctactaagtaggaaatcattgctcccatcggacctgcttcattgatggtataacctgaaccaaggaaaaaaccggtaccaatacatcctcctagtgatatcataaaaagatgccttgttttcatcgttctttttaattctcctggctgtccctgtggaatattcatcccatttcctccctttgctgcataaaaaatgaaatcgctttcatttttttaggtttattttgtttttatagccgcttactaggtagctcttcatggctgaagtccatgaatgccggatgtttttcaaatggcgccagccccgtagcgaggatggcagccgattagccctgcatgaccgtttattggatcataacagattttcttctacacgatacctgtaagtagctctttcttataaaagcttatcaccaaacaatgaactcattaacgcaaccgctacttctgcagttttgttatgctgatctaaaatggggttcacctctacaaattcagcagatgtaactatgtctgcttccgctagcatttccattgctaaatgactttctcggtagctgatgccgccttttacaggtgtacctacgcctggtgcatcatccggatctaagccgtctaagtccagcgacaggtgcacgccgtctgtgccgcttaaataatcaatcgtttctttcatcacttgcgtcatacctaaacgatcaatttcatgcatggtatacactttaattcctttttctttaattaactctttttcaccatcatccaatgagcgtgcaccgataataacgagattttcaggtttaatttttggggtataccctccaatatttaaaagtacaggatgtccaataccaaggctcaccgctaatggcatgccgtgaatgttgcctgatggagatgtttcagctgtgtttaaatcaccatgagcatcataccaaataacgcctaaattttctgaaccttttgcgactcccgcaagtgttccaatcgcaatgctgtggtctccgcctaatattaacggaaagcggtcttgctctctcacttcttcaactcgtgcagcaagctgttcatttccgctggctacagccgctaagtttttcaaattcgtatttttatctacgtctgcccgctctttaatttctactttaatatcgccttcatcgtgtacggtatagccaagagcttctaagcgtgtattcatgcctgcatagcggatcgcgctcggccccatgtctacaccccttcttgtttgtccgtaatccatgggtacaccgataattgaaatgtcttttttcattttctatacctccgttgcattttattctgtgtgaagtaaacataggtgtttatttaactatgtattttttcattgatacagcccctcatctatttcttatgcaaaaatgatgccaactttgtttgtagcattctatcagtctttttatcacaggttttcttacacatgccaaaaaaactgtcgatttctacaactttttggcaaaccacgcaaatttttttgtcgtttcgtttaaaaccgccaattttatttgctttcatagaaaagagattgcgacataacaaattccattcaacagctagaagtaactacacacagaaaacctaagtttgtcataccaataaaaaaatccgaacgagttggattcttcatcaagaatctcaattcatcgttcggatttttcttcacctaaaatacttttgtcccagtctcttttttaatttgtaataacatctccgtcttcatcatcgcctgtatcgtcttcaccaggatctttttctaatgagaccactttcttttcgtcatcccatttcactttgtagccaagtgatttggctactttgataactgataaataagagtgatgatttggtttatacagctttaagtcactcgaatcaacgacgcctaagcctaacagcaggcgatcggattgaacgtaaggctttccatcaatcagcttcacttgcttatcagtaaatggataaacggcacggttgacttcaactgtaaactctccttttttctcttctttaattggttttggctgtttggatacatatttaattgcgtctactcctaataccgtgccctggcgcgtattatcagcgcctccgtacattttccccgtttcatagtcatagataaccgcttgaacgtttccaatatgctcaggcttttcctcaaacgcatgtcctttagccatcatttcaagaattgtatcttggctaaagccaggttcccatcttacggttggatagccgcctgaataaatacgaggtgttaaaatcgctttttgaatcggcatcttatggtcaataacattcataatcgtttctgctacagacgctataatggttggccctcccggtgaaccaattgccatgaacggctttccgtcttttaacagcatcgttggagacatgctgcttcgaggacgttttttaggctcaacctggttcacgcctcccggagtggcatcaaaatccgtcatttcattgttgagcataaatccgtagtcaggaaccataattcctgaaccaaaaacttgttcaatggtagtcgtgtaagaaaccatgtttccccatttgtctacaacagagaaatgagtcgtttggccgattggattttcttcctttactgttgctttatttggattttctttcccttcatatttccaagggtctccttctttgacattaggcgttgctttgtttggattaattaatttacgacgttctttaatataatcttcatctaacagtccttttttcggcacttcgtaaaagtcttcatctgccatatacgccgcgcggtccgcgaaagctaagtgcatcgcttccgttaaatgctgcaaatactgaggcgtattggaacccattttttctacatcataaccttccattagctttaaaatctgctgaacggttaatccgccggagctaggaggagccgcactaaccacatcgtagcctcggtaagttgttttaaccggctcacgttcttttacaacgtaatttttcaaatcatccatggtcatgcttccatcgcgtttttgaacttctttaacaagcgcttttccaatttctcctttataaagagcgtctgacccttctttttgaataagctttaatgttttagcaagatccggctgaacaagcttatctccttcttttaacggcttgccattcggcacaaatacattaccggccgtttggtatctttcaagcttgtccgcattttcatcaatgtactgagccatcgaccaatttactttgattccttgttctgcttgagtaatagctggtttaataacatctgataagtccattgttccgtaatctttaagggctgtttctaccccttttagcgtaccaggaactccaactgcttttcctgttatgtgacgcttactgaaagggatgacttttccttttgaatctaaaaacagcttaggcgtgacatcagctggtgccatttcacggctgtctagcatcgtaattttatctttctttttttcataaatcatcataaagccgccgccgccgatacctgacatcatcggttccacaacgttgagagataattgaatggcagctgccgcgtctacagcgtttccgccttcagctaaaactttccttcccgcttcagcagccagcgggtgagatgccgctacaattccttgtgtagcacctcgtttcattgaatggtcgacacccggaacttcagcagcagctggtgtgacaactaaacttaaactaaataatgcaataaccaacatcttcataaccttcacctgggtctcctccttcaaatacattatttcacatcgtctgaaacgatggattccacaaggaataaatttgtttattatgatatttcttacatatgtgtataaataaaaagcaaagtaaatcagacctttgctttttttagttagtcgcatgtttaacttttctctctatccatttacaattatctatattttctaacaatttatccataggctgatagtttcttactatttttggaattatgtagactgaacgctctaataatgtagaaaatctagcagttaagaagtcgttggacttacatgcacttcttaaaatttctataaatattcctattgttatataaaaagcaattctttatgaaaatcagcatatgtttcctaaaaaccaaaaataaaacaggacttttgattcaccgtcctgtttgcagcatgttttcgacttttttaatatccgcgtgagtaggattgatttctcgggcataggcgatttgttctttcgctttttccatttcttttaattgaatataggtttttgcgagttcgagcggcagcataaccccttcaaaaccaagatcttgtgcccgctgcaagtaagacagcgatttttcgtaattccctccaaacataagcggagtttcccggtattttattcctcgaacgaagtgcgccaagcttgaagatggatttaatgttaatgcctgatgaagagctctgtccatttctaaatttaataccattttttcaaaaataattgattcttcgatttgctttgctaaacaaaccgctaagtaacagtacaaatcagatgcttgaggttttttcttcatttcttgttgaatttcgcgcttgatctctttccacttaccctcttctagctgattcatgacgtattctacatgtattcccaccactttgccctccttttcctctttatcataaaggatttctgcacaaatgaaaaaaataagtgttcttcatttttctcaaaagatcgttaccgttaaaaaacaggcaaatttctcaatcacttaacccaattagtacataggatatagagaattttattaaaggaggttacacatatgggcgcaaaaggcggttttggtttttcatttatcgttgttttatttattctattagtaatcgtaggatgttcttgctactactaatttttagaggggatgaacatcattcatcctctcctatttcaaaaaaaaccatgctttcgcatggctacataccgattagatgaatgagtagaggaactcattgttcggcaatattgaagaaatttttggttttcacttccgcctagtatgccctttttgacgggggctatgcgcaaataaagttaacgtttaaaagcgaaagccagacgcacctacaataacaagtaaaacaaataacacaacgattaacgcaaaattttgttttcccacgtaccatccctcacttcctgttatctgcttttagtgtatgcaacagcttggcaaaatgtttaggacaggggtgcggatttttttaacgagaaaaaccttcaaatttcgccaaaaaagtgaatcatatttttgtttctttcgttatatatagtaagagatttttttactataaaaaaggggggcctttaatgcgccgacattctaaattgcccattgttcttgtctttgccttctttttattcatcgcaacagttttgtgcgtaacctcttatatgtcttgaacgtataaataatataaaaaaaacgcctcatcgaaggcggtttttctaccctagcattatatcttcatttggataacgaacggcttcacgcttttgcttagataatgaaaacgcaagcgttaatggccccacttttcctaaaaacatgataaagataataatcacgcgtccaaagtacgaaagttcaggagttgctcccatcgataaacctactgttccaaacgcagaaacaacttcaaacataatttttacaaacggcaggttttccgaaatatttaacaggaaaatggccccaaatacaaacataattgaaatcatcgtgatggctagtgccttaaacacgtgaagaggaagaagtcgtctctttaatagcacaatatcttcccggcttcgtaaaaatgcccatacagaaaaaacaatcaccacaaacgttgttagtttaataccgcctcctgttgacgcacttcctgcaccaataaacattaataagaccattaaaaagaccgttgcgtcatgcaggtgagctaaatcaattgtattaaatcccgcggttcttgtcgttaccgcttgaaaataagaagcccatactttgtctcctaacgataaatttccgagcgtatgcgaattgctgtactctaagaaaaaaataaaaagcatggcagtcacattaatcgcaaacgtgctgataatcataatttttgaatgcaacgttagttttctatacgattttttcacccacatatcagcaagaacggtaaaccctaacccaccaatgatgaacaaaaaagaaatcgttatgttaataataggatctccaacatactgcactaagttatcagaaagtagtccaaaccctgcgttattaaaagccgaaattgaatgaaacaagctaaagaacagccccttagaccatccgaactccggaacccagcgtatcgctagaaagataagtgcaacaaactcaattaaaaatgaaaagataaacagccttttaactagcaggacaactccgccgacgctcgtttgatttagtgcctgctgaacgagcatacgctctttaaatccaatttttttacctagcatcataaaaatcaacacggcaaatgacataatgccaagaccgcctatttgaattaacagcataataatgatttgaccgatgacggtaaaacgggtacctgtatctacgacggctaagccggttactgtcatagcggaagtagacgtaaaaagggcatctacccaccggattggctcagtagtagaaacaggcatcatcaatagaagagcacccataataattcctccgccaaaaatggagacaagcagctgcggaggagtgagtttaatgatttgttttttcataagttaaactccttcttcttcaaaacggttcaaatcgcggttatgtccgatgacaatcagcatatctccttgttcaattatttcatgcgcggtaggcgagatcaccatttccccgtcttttcgctgaaagccgataatattgcagccatacttggcacgaatgtttaaatcaaacagcgttttattatgaagtttcttagaggcgacaatttcgacgatactataatcctttgacaattcaatataatcaatgattttttctgacaccacgtgatgagcaatacgcttagcaatatcgcgctcagggtgaatgactttatccgctcctattttttcgagcactttttgatgatacatattcactgcttttacccatacttgcttaacgcccatatcttttaaaagcatcgttgccagcacgcttgcttcgatatcatctccaaacgaaataagagcatgatcaacattgcgaatacctagcccctttaagctagcttcatcaatcgcgtttgcttgcacaacatatgtagctgagttgctaaatttatttactacctcctgattgcggtcaatagcgagcacatccacatccagattagcaaactcttcaaccaaactgcctccaaaacgacctaatcccaatacagcaaactgttttttcataatgtatttattcctttcttcaactgctgtgtgttctcttagcttatactttttctaaaaaattacatctttttcttaaaaaaagcgcaaaaaaacacaggaaggctcctgtgtttttccacactcttccccctcaaaacgcttgcgaagttagctgtcgggttcgggttttaagagtaaccctacctttttaaggattcaccccggagcacaatatgtgcgtacataatgggtcctccgctccgtaatggattaagcgatttttattcaaatatctatgatctattttttagaataatcgattcgattcatgatacgtttcactttacgaaagctatcttactcctgtggattttgtctgtcaagatatttttagcgaagacctcacttgccctgcaagctgcaaaaatcatataaatctaaactgacaatcattttgtgaaattgatcaaataaattaataacagctaaaagctctaacagctgcgtatcactgtaaaatttctttaattgattcatatcagcatccgtcaactcccttggacgcacccggtatacatcaataaatcgaaacagcagtcgatctttttcttccagctctttttctcttaacactttttgattaagcgtctcatcgcctacatatgacatgctcatacacgtctcacagccgttaacacctgctagataaagccttattttttccttagtctctttttctattatatcgctgttccaaagcgtgtcgtaaagctcatcatacaatctttttacatgcggaattaaattcaatgctttttcaaaatttgttccctcttcgtttgctaacaaaactcttgccatttttcactcactcctttttaattattatagtaagaaaaatggaaatttcagattacagataaaacatcttagctactattactaatcaaatgaaacgttaatgagaaagaaggttttcaattgaaaattgatgaaattgatttatcgattttgcaggcgctgcagcaaaacagccgcctttccttacgagagctaggaaaacaaattaacttgtctcctccttcggtggcagagcgagtacgacagctagagagctttggtgttataaaagggtatacgattgatattgattatgaaaagctgcatttgcccgtgtcgtgttttattgaagtaacgatgaaaaacggagagcacgagcgttttaaacgatttatttctcagtatccctacgctttattctgtgaacgcatcgccgggcaagcctgctttattacaaagcttcagcttcctcacctgcacgtactcgaacaatttattaacgaaattacaccttatgccaaaacgatttcacacatcgccctttctcacgtggagatggctcctgcattattgagtcatttaaaagatgaaaagtgattgaaacgtaacgaaaaaatccgaacgattggattgatcgttcggattttctttccactaaactacttttgtcccagcctcttttattcgtccaacagcataaaaaataaccctccaaagctggagggtataaattttccgaataatgaaagttttacaacttcattttatcaggtgacgacatttctgtctacttaaaaatgtaaaagagctctctagtactagagagctcttttacctgcttgttttggagaaacaatcaatctatataaaagggaactacctaaggctgaaagtcacgtgaaaccttggcagttcatcctggatataccggttgatatgattcaaaacaagttctttcatcatttcttctttgacttctgattccgtttttttatctttttgttttaaaataagaatataatagaccttacccattttaatgggcttactactctctccgatgtgctgtttttttaaaacatctataaaagagggagatagacttgaaagctttagattatcggcattctctattttgctgtctgtctggacatcagcatattttttttgaacgtcctgaagagatgttcctttttgcagttcagccgcagcggcagcggcatcatgtaaagtagaaaaagccagctgcgtaaaagatacgcgcgttagatcgttttcaatacgtttatagtaagcagttagttcatcagacgtaatttgtttgcggaaatattcttctaatttaaactgattcgttagctggttggttacatcactagaacgaatatttaacacttcataaccttgttttcttgtatcctcgttatatgagcgtttaatttgcttccacatatcctcgacttgtttttgtactttatcgcttgtctttagatgtgaaattaagattttttgcataacaagctgccgcaataactctttgcggtagcttgtatcatttagcggagcatctggatttaagaacccttcaacggctaaaaaacggttgaattcagctcctgtcaccttgcctcgctcatacgctgccagttctttggtagaagatagctgactaatttctacagaaggaaacatcgtgtttgaatgcttccctccgcagccggttaaaaatccgaaggctgttaatactgctagtagcagctttaacggtgttgaactcatccattgttatcctgctgctctgaaagcttcagagaaatagtttgtttttttccatttcgatacacgtctaattttaccgtgtctcctactttacgttttgtgtatagatattgacgtaaatcactggatgttttgacttcatttccatcgatggcaacaatcacgtcttttgattgtaaacctgcatcagaagcagaagagaatggttcaaccgtcgttacgacaactccttcagacgtatcgctggttaggcctagctggttttgttttgttgcagctgaaagctgacctacatcttgaagacctacccccatatatggacgcgttatttttccgtttttcatcagctgttcaatcgtcggctgcacttcatcacttggaagagcaaagccgatgccttctacattgtcttctgaaattttcatactgttgataccgactacttcaccggaagaattgattaaggcaccgccgctgtttcctggattaatcgccgcatccgtttgaattgcatctacgttccaattttctgaaatagggacagagcgttttgctgcgctcacgataccttgtgtgaccgtacgagaaaattgttcaccaagaggatttccgattgcaagcaccgtttcacctgctactaaatccgatgatttcccgaacttcgccacttgttcaacatttttgtcagacatctcaagcaccgctaaatccgttagcgcatcagctccgacaatcttagctttttctttttgtccgttggaaagtgacacttctacttcgcttgcgccgtcaataacgtggttattggtcacaacgtatgcttttccattttcttttttgaaaataacaccggaacccgttcctgcttcttgcgtttgggtatctccagaaaatggatttgtttgctgttgaatattgttcacgcctacaacagcagctgatactttatttacaactgaaacaagatctgactgattcacggttgtgcttactgttcgaggcgttgtgctcgttgttgttgcggtttgagtctgcgttgtttgattcgctgtttgcgtatcagctgaatccattaaccccagctgcggagcaccgtatagcacaattcctccacctagcactgctccggcgatagaagatgcaatcactggaaataagcgtcttcttggaggctgtgatgatgacgcaggctgatactgatcgtagcgctgctggcggttttcatattcttcttttcgttcttgctctctttcataatcacgtggatccatgaaaaacactccttttaacgtagcaaattttatgttatctatactataaaataaaagtttgggataagtatcaaaacaatgtgtgaaattgtgaaaaatttctttataacagcaaacacgtagtataatagcgggtacatagacctttagagaaacgcacacatatggcgtaatatgctttatttaccttaattttcatatattcagaggaaggtgtcaaatttgagctttacactatatttagtagaggatgaacaaaatttaaacgaagttttaaccctttaccttcaaaaagaaggctgggatgttcgctcattttttaacggcacggacgccaaagaaatgattacaacccctccgcatctgtggattttagatattatgctgcctgatattgacgggtatcagctcattcgcgaaatcaagcagcaaacgccacatgtgcctgttattttcatctcagcccgcgatgccgatattgaccgggttcttgggcttgaaatgggcagcgacgactatttatcaaagccttttttgcctcgtgaactagttattcgagcaaacaaactgctaaaccgcgtatatggttccaatcaaaagaaaaccgataccattacgctgactccttatgaaatcgatttacatacccgtacagtcagtgaaaatggaaagccgattgatttaacgtctaaagaatttgattttctcgtcactatctcaaaagaccttggacaggctttttcacgggagcagctgctgaatctcatttggggagaagattatttcggcacagaccgagtggtggatgatttagtaaggcgcgtgcgtaaaaaaatgccgcaagcacgaattgaaacgatttacggatacggataccggatgatgaaagcatgaaaaacaagtcgcttgcatttcaaatttggctcgtcatctccggtattttactgcttatttcaattttgctcgctattttattcccaacgacgctcaggcagttcttcacgaatgaaatttataccactattgaaaatgaacagcatattttaaaagaatacggactgcccagccgctcaggtgaatactactttagcaatgaagacagtgaaccaacacttggaaatcgaaccgtggatcatattttattgcctgaacatgcggatatctcttatttttcatcacgggtgttgcctcaagactttttgagaaaagcacaggaagatgcaatcagccagcgaaaaatcgtcgctcgctatgaaaaagatcttggcaaccggacgcttttttatgtaattcgaaaagtaagcgtaaacggacagcctgcttttttgctttcattttcgtgggatacgtatcgcaacgcgctcacttctactctgtttaaacagctgcttcttgtaatttcaattgtatttctattcagctggcttccatctatttggctatcaagatatttaagcaagccgcttgtatcgcttgaaaaagatgtgaaaaaaattgccgaacaaaattggcatgagcccgttgcagtcaaccgttccgatgaaattggcaagctaggcgcctccatcgagcaaatgcgcaaaaggctcgtatctaaagatgaagcacagcaaacgctgcttcaaaatatttcacacgatttaaaaacaccggttatggtgattcaaagctacgctcagtcgattcaagacggcatttatccaaaaggtgatttatctcaaacggtaaaagttattgaagatgaatccaaaaatcttgagaaaaaaatccgcgatttgctttacttaaccaagcttgactatatgtccactcatcagcttgcacaagatgactttgattttactgcacttcttcatgaagtagtggatcgcttgcggtggaggcgccctgaaatacagtgggaatttgacgacgaaaacgcaacgattaaaggagataaagaactgtggacaaaagttcttgaaaatgtactcgacaatcagctgcgctatgccgagacgaaggtttcactttcacttgctaaacaccaaacgaacgttcaatgtaccatcagtaacgatggtccgccgattgatcaaagcgtgcttcaacacttgtttgaaccgtttaaaaaaggagcaaacggtgaattcggtatcggcttaagtatcgtaaagcgtattgttacgatgcacgatgcagccattacggctgaaaacacagacaccggagtaacgttttcacttactattcctatataaactaaaaaagcaagggattcgaatcccttgcttttttatgaaaaaattgatgtataggcataaagagccggtgaaccgcctgagtggacaaacaccacattttcatccttattaaaataaccttttcgaattaaatcaattagaccagccatcgcttttcccgtatacacaggatccaataaaatcccttccgtactggccacaagtttgactgcttccaccatctcttctgtcggaacagcataccctggacctacgtattcatccatacatacaatctcttcttttttaaaaggcgttttactatgtaaatgatcataaagttcactcgtcagcttggcaacttttacttcttgctcttctttagcacgactgacattcattccaataacagatacgtcactttgaagaccttgaaagcctgccactaatcctgcatgcatgcctccgctaccgcttgtacaaactacgtggttaagctttatttgctgctcatagctttgcataagcagctcttgtgcacaggcagcgtatccggttgcaccgataacattcgaacctcctactggaattaaatacggtttatgacctttttcaattagctctcgctctactgttttcatttcggctgtcaaatcagaaccttcagcgacaaaccgcatgtcatgagcgcctaataaatgataaagaaaatagtttcctgtgggctgatcgcttgctttattttcgccttcttctaatacgagcacgcatttcatttgttcttttacagccgcagcgagcgtcaaacgacagtgattggattgtatcgcaccgcacgttacaagcacgtctgctccttgcgcttttgcatcagctactaaatattcaagcttgcgcgtcttatttccgccccctgtcagtccaagcatatcatctcgcttcatataaattgaaggtccatttaactgctgagataaaaccgatagcttttctaaaggtgtaggggaatccgtatattttcttctagaaaattgagttaagttcatgctctcatcctctctttcatatttgttctattttaccatatagaagcttttgaagagctttttacggaagggctttctataacttgtatacataagaacaagtagtcaacatacattaaaccatataaacagtttgaaggagtgttttcaatgagtgaaaaagcagtactttgcagcgtctcacgagtagtcaaatcacagcacatttttccaaatgacctaaacaatcatcacaccctttttggggggaaaattgtcgctgacatggacatgacggcttctctttcagcagctaaacattcccgaaagacgtgtgttacggcttccattgatcacgttgattttatcgaacccgtcaccgaagaagattttatttcatatgaagcattcgttgttgttacaggaaaaagctccatgattatttttgttaaagtgattgccgaaaatttgttaacgggcattaagcgtattgcagctacttcttttctcacctttgttgcgttagaaaacgggaaacctgcctccgttcctcaagttattgctcaaactgaagaagaaaaaagtcttcaaaaagtagctcttgaacgaaaagagtccaaaaaaacgcaggttgagcacagcaaagcgattgcgagcattttatctaaatctttgcgcagcagtaattaagctcttcatctaaaaagcagctgtctgctttttagacgaagtttttttagttttcacattgttatttaatgtaatatgcgatatattggttttatgaaaaataacattcaacctctcaaacgactttctttaagggaagaagtctatcaaacacttaaacacaatattgtcatgcttgaatttcatccggaacaaaagcttcaggataaagaactggctgagcagtttggagttagccgcactcctgttcgagaagcattaaaaaggcttgaagatgaaggccttgtccaaacgacacctggttcttctacaaaagtggctccattaaaccttgaggaggcaaaacaatcttttattgtcgtcgcagctcttcatgcacttgctgctaagctggcttgtacttcgttacaagaaaaagatatgggcgaactaatcaaacacaatcaatctctagaacatgcaatcaaaacaagaaatgtccttaaagcgatcgaagcggatgaaacatttcattccatctttttaaaacgggcgaacaatatagagctagaacgtgttgtaaaacaaacaagcgccaaaattcagcgtctggaaatcgctcgtttttcgtctcttgctagtcttgcttcggttgatcagcacaaagaaatcataaatgcttgcggtcaaaaagatgccgcactgacatcgcagcttgtggaaacgaactggctgacgctaggtgaagcgctgacaagtgaggaggaatccaagtgaagcctcttttattaggcattgctgcatcattcttttttgcttttacattcgttttaaatcgagcgatggatttatccggaggcagctgggcgtggagcgcgtcgctgcgctatttttttatggtacctcttttgcttgtgctcgtttatttttggggtggtattaaacctgtggtggcagaaataaaagctcagcctcaaaaatggctgctttggagcacggttggatttgggttattttacgctcctctttgttttgcttcagcctacggtcccggctggcttattgcaggaacttggcaaatcacaattttatcggggtctctcctagctcctttgttttacaaggaaggaaagaagcgaggaggcattcccttcaagcagctaggtttttcgtttattattttaataggagttgtgctcatgcagcttgagcacgcgactgaactgtcggccgctactgccttgctttgtaccattcccattttaattgcctcttttgcatacccgcttggcaaccgtaaaatgatggaagtttcgtcacttaatacgtttcagcgcgtgcttggaatgacgctttcaagcctgccgttttggattattctttctgtctatgcctgcgtgaccgatggactaccaaaaacaactcagatttatcaaagcagtttagttgctttactttcaggagtatgtgcaacagttttattttttgcagcaaccgaccttgttaaaaaagattctcaaaagcttggcgcagttgaagctacacaatcgatggaagttttatttgccctgctaggagaggtcttccttctatcaagtcctttgccatcgattctttcttgggttggaatgggagttatcatagcaggcatggtccttcacagctaccaaacaagtcataaaaaagctataccgcaaaaagaattgacctactaattaataacaaaaaagagcgtcttagtcggcgctctttttgtttatacaacagaccttctttctaaattgaagacattcacctgctcagcatcaaagcggcttagcaacgaatctactccgtactcaagtgcaaaagcacgttcattttctgaaatcggaacggcctgcaggaacgttacttttttatcagatagttcaatcgttgaaaaattatcccataaaaacggcggaatcagcaaaatgtgctgcatatgaaagctgtcatcaagaactgcaataacgtctttataaatagctcctgggaagatggacacatgagatttcatcatatggaaaatacagtttgctaaaatagcagaataaataccgaattcctcatgacaagccccaacgatttcaattcgaagcgggatccctccaactgtatagcctgtcggacattgatgtccaccgagcgttgcatacgcggttacgtcttgacgcggatggttttcacacgccacaacgtgaataccatgtttttttctttcatctgaataatcttcaattcgatccttttgaccaaatacatctattgctttatgtataattaattcttcatcttttgtaaaattactcataaaaaacctccttgcttgcgaccttaaaaagctccctactgtacagcatatactactgcacttgcttacgatatagtttttagaaaatgtgatagaaatgttatcgtttcgtaacatactatgatattgtatcaagaagcaaacgagaaaccttaaccaattttttcttttcccataaaaaatagagcctgcaccatggcagcctctattttttatgacattattatgaaataatttgcaattcttttgggtactttgttaacgtttcgtatccatcttttgtaatgattacatcatcttcgatacgcacgcctccaagtcctggaatatagatacccggttcaattgtatataccatgccttcttgaagcacatcatcattgttacggctcattgaaggaaactcatgcacgctaataccaagaccatgaccaagacgatgcaagaaatactctccatatcctgcttctgtaataatattgcgtgctaccatgtccaagtcgccaattcgagtgccgggcttggaagcttcaagtgctgcctgctcagcgcgctgtaccgtttcatagatttctttttgcttatcattaatagacttgtaagcaactgtacgtgtaatatctgaacagtatccgtctagcactacacctaaatcgaacagaaccatatctcctggctttaacgtgcgaagacctgggttcccatgcgcttctcccgttttttcaccaaataaaaccatcgttgaaaacgacatctcacgaattccttttcgctttagcttgtattcaattttagccagaacatccatttccgtaacgccttcttttaaagcagctacgcctacttctacaccaaaatcagctaaggcagctgccttttgcagaatctcaacttcacgctcatctttaattaaacgcagctgatttaacttctcttctgctccgactagctcagcgtttggatataggctaagcagttcttcggctctcgcatacagcagctgctctttctctacagcaacctttttcacatctattacgtttcgtttatgtaaagcttctttaataagttcccaaggatgttgatgatcttcatatccaatcacatcaaacttccagcccgcttcttttgcttgtcccacttccattgatggacaaacaagcatcggctccgcttcgtcaaacacaaataagccaagcaaacgctcatgcggatccgtgtgaaatccagttaaataaaatacgttttcggttgacgaaataaaggccgtttctacattcttttcttttagccacgatacgactttttgtaaacgtgcttccattaaaaaaacccctttcattgtgcaatattactattataacatagttatttagcaatattgtacaatgaatagaggttaagacaaagccgcgtgaagagtagtaagctgctctttaatcgcttttcgctgaatacttactttcatcagccagccattttctccgtatctataaataaattcgtacgtacctttaggaaaatattcttttaccagcatgtcccgattttcaacaaatcccggatcgccaataaaataggtaccttcttcaagcggaagttcatgaacttttttttctagctgcttctcttcatcttcatcatcatctataacaatgtgcagaccgtattcatcacgcacaacatcaaattcaccgttttgttcaagctcgagcacaggcaccacttgtccatttaccgttagcagctgcttcgttccttcaatgacctgggaccagtgatcatcgtataaagtagaagaataaaaaatatagccctgagatttatataataaaagaagctgttcaaaatgatttttcacttgttctttatcaaatagaataacaaaatgctttcgatagaaaaaacttgtaaaaggcagaatagacgattgattaagctctttaattatttcagcactatctttacctgaaataatagctccggtcaattcccccgcgccataaggtttccaatgacttaacgccgcttctggaatcagcacaaggttcgaagatgacacatatatactcattcgcttcactccttttttctgcatttagacctatatttgattctccgcaaacagagactttcctcttattccattcttaaaagacagaactttttccccaactatgatagattataacaaatatcctcgaaaaaaataacctttatttcctctttcttctatttgtacacttttcttattttagctgtcttcgcagatttactagtgaacgtacttgctaatctaattccttagtgttaattttattatgtcgttttataattttttgcataattggtttcaaacaaaaaagtattaatatttttgaatgcgatggtgagacatttggaagaacgtacagaacgtaaacaacataaaagaaaaaagcaaagaaaaaagaaacgctttagaaagctacttcttttctttctcattcttgtaatcgccgctggtgcgtatgtgtattatcaataccaacaagggttagcagaagcagacggagcttttgggaaagatggacaatttgattttaatggtgcaagtgccaatttagatagcatgaatgtgctgcttcttggaattgactctcgaggtgaagaacattcgcgtgccgatacaatcatgattgctcattatgacaaagacagcaatcagcctaaaattgtttctttgatgcgtgattcatatgtggatattcctggacatggcaaaaacaaattaaattcagcctatgcatttggcgggcctgaattaatgcgtaagacaattaaagaaaatttcggcgtagatgtaaactattatgccgttgttgattttaaaggcttttctaaagttgccgatacgattgcccctgagggaattacggttaccgtgccgcacgaaatgtcatcaggaattggcatgacgctaaaacctggaaaacaaactcttcgcggagataaattactaggatacgtgcgattccgacatgatagccaaagtgatttcgggcgcgtgaagcgtcaacaagaagtgatcggtaaattaatggatgaagctcttcaagtaaagacgctggcgaaagctcctaagctatggggcgtcattgatccatatgtggatacaaatattccgccaaaaacatttattgtgataggaaaagattttttagttggaaatcagccagatttaaaatctcttcgtttaccggttgaaggttcctattcaaatgaacgaatatccggtattggtgctgttttaagcatcgaccttgaagaaaacaaacaagcgttacagtcatttttaaattaggaaaaggtgtccattggcggacacctttttttatactattcaaaaaaacttctgtttttcctccctatccttcaaaaaaatttgagcttcgacaaaaaatgaagccattttccaggaaacagctatttctttgaagttctatttttcctgttacatgcgtatatgaaaagagaaggacttcttttttatatttttgattcaaggagatgaacgtatgaaattatatggttttcaatctgaagaagagcgttcctttcttcattctacttataaagtaaacccattgctttctcatactggagatgtcaaaattagctttctatcttttcaagaaaatgattatacccctcgtcaagaagctacgattccacagcttctattagtcgttcacggggaaggctgggtagctggggataacggcctgaaaatttatatcaaacaaggtgaatccgcattttggagagcgggggaatcatttgaagtcgggagtctaacggctatgacaggattactcattgaaggattagatatcgctcctcaaaagctgcttacttctttttcacgaacaaatgtaaattaaaaagccgcgttaacgcggctttttttttattatcttagtaatcgagcgtagctttcagcactatcttgaataactttgtcactcaggtcaccgcctgctccttgaaataaaaatggcgtttggaacttcatacctgttaaatttgccgtagcttgaaacggaagaagcagatgattcattgggtaacggttgtatcccccttcttgataagcttccgcagggcctcctgtcgaagtagctacgacaaactcttttccctgaagtttagtacctttgcttccataagcccatccgtatgttaagacaacatcttgccactcttttaagagtgccggtgagctgtaccagtaaaatggaaattgaaaaacaatacgatcgaattgaacagctaactcctgctctttttctacatcaattttgaaatcgggatagtttgcgtataaatcatgaacgtacacattctcttctttttttactcgctctgcccacgctttattaatgcgagaagatgctaagtttggatgcgctaaaataacaagtgttttcattttgctactctccttctaatgtctgtgcttgctttgttcttttctattttttacgcttgcctctcacggcttgctcagtcattctttccttttccttcagcaaatccaagttagtttacacttataaactaccagtattatcattttgcttcaataaaattgactttgcttttatcacctttactttttttatgtatccaaaacggcagatagaggacaagaaagctaagaatcatgattccttcaatccatactaaataccaaggatgaggtccaagaacatccagcaaggaagcgtgttctggctttttcatcatgtataaataattcgccccgagtaaacgattcatgacatagataaaacctccgtacagattaacaaatactacgcttacccacaaagaacgaaacgtcggctcatatctgcaaacagcaattagcatacagcaagcaagtaccacaccgccatgcgatacataaaactgcacatagcgaaactgggcatacgcatagccgccaaggtctggggtaatcatcgcttgaacagagctgctgattcctgcgaagtacacaaaataaaaaagaaacctgcttttggttatcagcataacagcagccagcagcacgactatatcactgagctgaagaggcaaggaagtttcaacagaccactgatggcagctgatttcccaagcttggtaggctgtttctgaagcaattagaatgagtgaaagcaaaatgaacacaaacctcttttttcgcagctgctttcgacacaaaaaaataaatgctcctataatcacgataatagctaaagttacaagatgttcaactgaaaaaagctgaaaggaatgttgtacaggatgacacgtaaaacatgaattcataaaagcgcctcccttccatcagaaaacaaattcggtacctttagcttgttcataagacttcattttcattaacacttctctcgcattaaaaagagattgagacataatgaaatcatgcccaaaaaaagatccgaacgattcatcattcggatcttctttcaactaacatactgttatcctagcttttttcttcgtttttactctctaattaatccttttttcactaagaattgatgagcaacttcttcagccgtttttcctttcgcatttacttgatagttcatttcacgcatttcctcatcactgattttaccgcccagttgatttaagatttttttcagttcagggtgctcttttagcgtatcttcacgaagcacaggcgctccttgatacggcgggaagagctgctgatcgtcttttaagactttcaaaccaaactgtttaatttcagggtccgttgcgtaagcatcaagcatgttaatatcgcctttttctacagcgcgatagcgaagcttcggctccatggttttaatattcgggaaggtaaggccatattctttttggatgcctacatagccgtcttcacgatctttaaactcaagcgtaaatcctgcttttactttatctgttgcatttgccaaatctgaaatagttgttagattattttctttggcaaattcttttgtcacggtcaatgtgtacgtattattaaacttcattggatctaaatagacaagaccgaatttcttttgaaactcttcttttgcctgcttgtacacctctgtttcatctttgctgtccggctgttcctttagatgcgtcacaatggctgtacctgtatattcagggtacaaatcaatttccttgttacgcagagcctcaaatacaaataccgttttcccaagcgacgaacgaagatttactttcatatcggtttgatcttcaattaattctttgtacatattaattaaaatgtcttgttctgcaccaattttccctccgataacaaggtctggttttgttgcgctcatcgctgcaaacggagaaacaagaatgagtattaatacgatgatcataataaacgagcgttttttggacccttctttagctgagtgttcaatcgttcgcagaattccatcaaaaataagcgctaataatgctgctggaatggctcctaataaaatcaaactattatcgcttcggtcaataccgagcaaaattaagcttccgagtccgcccgctccgataagagccacgattgtcgctgtgccaataatgagtaccatcgctgtgcgaattccggccataatgacaggaagtgctagaggaagttctactttaattaatcgtctccatgagttcatccccatggctttggatgcttcaattaaagatgggtccacttctttaattccggtatatgtatttcgtacaataggaagaagcgaatataaaaacagtgcaataaccgcgggaaaggttccaattccgacaagaggaatcagtaaccctaataaagcgagtgaaggaatggtttgcagtacggctgttacgccaatgattggttcagcaatgcggtcatgcctcgttaagtacagtccgagtggcactgaaattaatacggcgataacaagagctagtactgaaatttgaatgtgttcaagaagagcttgaaacagtgcatctcctcgttgatctaataatgtgcttagtgcattcattacagcgttcctccttctttcgttttatcagaaagaaacgctaatagagttttgcgcgttacgacgccaattcgtttgctccctttttttacggctattgcttcatggtcgtaaagggcgtccatggcctgctgaacagtggcggttgaagctagctcttcagtaggttctacgtccggctgttcactttctttgacaaacatatccaatgtctcaaataaagcattcccttgatttccaataaatgtttttacaaattcatttttaggcttttgaatgaattcctccggggttccaacttgaacaatttccccgtctttcatcaggcagatacgatctccaagcgtcatcgcttcgctcatatcgtgcgtaacaaacacaaatgtttttttgattttttcttttaagctaataacatcttgctgaagctgttcgcggcttaacggatcgagggcactaaagggttcgtccattaaaataacggggggatcagctgcgagggcacgtgctacacctacacgttgctgctggccacctgagagctcagacggctttcggtttcgatactgctttgggtctagtcctaccaaagtaagcagttcatcaatgcgcgttttgattttatttttcttccaatgcttcatctcgggtacaatggctatattttcagcaatggtcatatgaggaaaaagagcaatctgctgcaggacataaccaatgttccagcgtagcttatgtatgttgtggtccgatacgagcttatcttttatgtatagttctccttcggtaatatcatgaagacggttaatcatttttaaggtggttgttttcccacacccactcggaccaattaaaacgaaaaactctccttctttaatttctagattaatatttttcacggcggtcgtaccgtctggatattgctttgacacattcttaaacgtaatcaaattatcgttcaccctccctgttgaaatttaatccctagtttcgtgtacccaatattcagaggcaataaacattcttttaagaatatttctaaatatgattcataagacctaggggaaaagatacacatattttctcataacctcctaataaggctatcaaactgttaaagttttcacaaggcgggaaagaataattttaaagccgacacaaataaaaaaaccttctttcaacaagaaagaaggttttttagtatgctagcgacagggatcgaacctgcgacctcttgcttaccatgcaagtgctctacctactgagctacaccagcgtcttggaaaattatatcacgtttaaattcatttaggaagcgcttttttaaatttttttattggtatattctctaatttgcttcttctgaaattcgcactttctacaaagttccatattttatgttagaactccttacataaattgtgtgaattttctttttttatattacccttagtaaaagagcttacaaaagaagggaagaaaatagatggaacaacaaccaaccatgaccaaatcaaaaacggcaactccctacccaagagactgcacgttcagcctggaagattggacgacgctcgctaagtattggtaccccgtcgcacgctgcagtgatgtaacagagaaaccaacgtccgtaaaactgctagatgtaaatctagttctataccgtaccacacacaaagtagtagcggctcgtgatttatgcgttcaccgaggcaccccccttagtatgggctgggtggaagatgatgaaattgtctgtccttaccacggcttccgctatgcaacggacggcgcatgcacgtcgattccagctcaccctgatgccaacatttctccccgcctgtgtatggctgtctatccagttattgaacgatttggattagtgtggacttccctgacaggtgaacaagataacctgccttacttcgatgcgtgggaggcccctgattttcagcaaattgtttgtcccagctttgatatcatgggttcggctggtcgtcaaatggaaggctttttagacgtagctcattttgcttgggtgcacacggacacatttggtgatcgaaacaacgcctttgtgcctaaatataaagtaagcgatacagattatgggcttcatgtagaatatacgagcaccgtgagcaattattccaaagaacagcagcatttaaatccacctgattttaaatggcttcgcgtctttgatgtttatccgccgtttacagctacgctaaaagtatacttcccagaaggcgcagagctgtggattatgaatgcagtctctcctatttcagcccgcgaaacacgtttattcgcaccaatcgctcgaaactttgacaaagattctcccgttgaaggtgtgtatgactttaaccttcgcgtctttgacgaagaccgtgaaatggttgaaaaccaaaagcctgaagacttgcctttagacctgcagatggaagcgcatattatggctgatcaaacgtccatcggctaccggaaattattaaagaaaatgggcttaagctttagatatacaagctaaagaaatccccgctgtctcagcggggatttcttttttatttagcaaactgctcgcgtcctgctttttcctttatcacttcatcttcacttgccggcgtggcgcgtttcataaacactgaaagaattaaggcaaccaccactagtactactgagacggcaaacgcatcgttaattccttgtaccattgcctgcatcccaatttgttctttcatttgagctgccccggctgccgttgcattcgctgctcctgctccgctcattgcatcttgagcaagctcttttgcgtgcgtagctgtacgatttgacatcaccgttactaaaagagccgaaccaatagctcccgatacttgttgaagcgtgttattcatcgcagtaccatgcggattaaagcgctgcggcagctgatttaatccgtttgtcataactggcatcatcaccatagacattccgaacatgcgaagcgtgtaaagcgtaatgagcgttgtatatgtcgtatcaagctctaagttactgaagaaatacgtcgtgacggctgtaatcgttagacccgttacagccagtgcacgcgctccgaatttatcaaataattttccggtaatcggagacatcacacccattagcagcgcacccggaagcattagtaatcctgagtgaagcggagaaatgcctcgcacggtctgaacatatattggcattaacagcatggctgagaataacgccattgtgattaccattgaaatcgttgacgataaagcaaacattggatatttaaaaatacggaattcaagcataggtgtttttagcttgaactgacgcgtaataaataaaatcagcgccacagctcctacgataatggtgccgtatacttccacagaatcccagcctttatctcctgctgagctaaatccgtatagaagtcctccaaatccaattgtagataacaaaagagataaaaaatccaaattgatttccactttttcttttttgtcttttaataggaagaaagcacctattaatacaattgccgcgattggcgtaacaaggtggaacagcattctccactcatagtgttcaatcagccaccctgataaggtagggccaattgccggagcaaaaatcataactaaaccgaagatccccatcgcagctccgcgtttttctaatgggaaacttgtgagcaatacgttcattaaaagcggcatcataatggctgcgcctgatgcttgaataatacgagcggttaacaagaccgaaaatacgggcgaagcaccggcaagtattgttcctgctgtaaataaagtcatagccgttaaaaataagcctctgacagaataacgctgaattaaaaaagcggtagttggaatcataataccattcactaacatataaccagtagaaagccactggacagttgacgttgtcacatctaagtctttcataatagacggcagcgccacgtttaataacgtttcattcaacaatgagataaaagcgccaattaacaaaatagcaattatgccataaggcggcttttccatttgatttatcgattgactcattattgtacctccttatactttaagttcatttttttagacacacgttctacatagagtatattatactgtgagttcaatttatgcaagcgaaaaatcttgcgttcatgtcctttattttatcgacttttttagtcctttaatccttttatatcaatacattgtcgtgatatcgccttttttttgaaaagaacatttgtgtaaacgctttaaatcatgtatcataaagttggaccatgagtctaattttatatttaggtgataataatgaacaaccgaaaacagcaagttgtaaaaaatgcacaccatctcttcgttgaaaaaggatttcaagctacatctattcaagacatcattgattatagcggcatttcaaaaggaacattctacaactatttttcttcaaaaaatgaattattaatcgctgtttttacctggcttcatacaacaattgaacaagagcgaaatcagctgctggttggtaaaagcctgaccgatgtagatgtgtttgttaaacagattgatgcacagatgaaaaaccatcataaacataaattttttacattacttgaagaagtatttgtttccaatgatcccgatttaaaagcatacataaaaaacacccagtttattgaagtaaactgggtttacaaacggttcattgatttatttggacaagaaaagaaaccgtacctgctagattgtgcaattatgtttcttggcatgcttcatcgcaactttcactataattttatggttaacggcacaaatactgacccccatgagatcataagctacagtgtcaagcgcctgcttcctcttgtagaggaagtagcaaattcaggagacattttgctcgatccgcaaacgattaaagaatggcttccatcttgcccgaatactaaacatcaaatagaacaggacatttctgcagcacttatcgatttaaaaaaacagttgcacaaacaatttacggatgaattcgaacgtcaaaaatgcacagagcttattagttttattgaagaagagctgtttaaacagccaaatccccgcaagtttgttgtggatagtgctcttcattcgttaaagcagctgtctgttaacaacagtaaaacgaccctagaggaactgcaaacgatgattgatcagtatgtgagtgaacgtcattaaaaagagattaagacgtaactaaatccatccaatttaaagacgaataaattgaataaaggagttagtataagttacttgttacaccgctgttgatttccgtacaagacttggctttctgcggtcggccggtgagcctcctcgtcgcgtacgcttctgcggggccttacctgttccgcttttcccgcaggagtcttcgccttgccctttcatcaaccgctaaaagcgactaaacatatgaaattcacgttcatcataataacaaaaaacgaacgattaatattttttaattaatcgttcgtttataattctaactaaaatatttttatcccagcctcttttttattttcctccagtaaacgagattcctttaataaaatatttattaaaaaacgcataaatgagtaaaatgggaagtgtaaaaaccatggaagctgccataatatagttccaataactgatatactgacctttaaatgtgttaagccctaaagttaatgtaaacatattttcatcagacatcacaattaaaggcttcataaaatcattccaaaatcccataaatacaaaaatcgtttgtgctgctaaggcaggttttgcaagtggaaggactattttgaagaatgttccaaacttcgataacccatccaactccgctgcttcttcaagctcttttgggaaattaataaaaaattgacgcatcataaatataaaagtcgcatttaccattccgggtacaatcattccctgataggtatttaaccagcctaactctttcaaaatcaaaaaattagggatcatggttacttgtccaggaatcataagcacagctaaaataataataaacaaacttttctttcccgggaaactgaggcgtgcaagggcataaccagccattgagttaaatagcaaattcagtgctgttcctactacagcaataaataagctattaaacatccagcgcgggaacagcttttgttccacaaaaatttgtttatagttgtctagcgtaaagtgttttggaataaagttcaccgtacctgacacaatttcttcaagcgttttaaaagaagctgacagcgcccaaataaatggaattagcgtaatcagtgcgtatatgcttaaaatagcatataaaatgaggacccccgtttttttcttcatctttttcttcccccccttagtacatactttcttcttttgaaaactttcgctgaataaccgttgccaccaaaatcacgagcgccaacataaaggctagtgctgcagcatatcccatggttcctaaatttttaaatgcatattgataaataagaagaacaacagttagagtcgagttattaggtccccctgaacctcctgaaaaaataaacgattgatcaaacagctgaaacgtgccaattagtcccatgatcaccacgaaagatgtaaccggacgcagattcggaactgtaatatgccaaaatcgttgaaacacattagcaccgtctaactgagctgcttcatacagcgaatcgggtacgtcctgcaaagctgccaaataaataaccataaaaaatggagctgttgcccaaatgttcataatcataatggcaatcaaagcgacctgcggatctccaagccaattgtaagttgggagaccgataaactttaaaaactcattcacaatcccattttgattgtacatccacataaaaataagcgttaatacggccgatgatgtaagcgttggtaaaaaataaataatacgaaaaactttttctgcttttagccctgcatttaatgtggcagccagtataagtgccaatgcggtttgtaccggcacaacaattactacatacttcaccgtattccaaagagcaattttagccttgtcatcttccagaaccttcatgtagttctcaagccctcgaaaatggaactcagtcccacccagtaattgaactttatgtaaagataaaaagatggcgtaaaaaataggtgcaataacaaataacaaaagcacaaacagtgtaggtgacataaaagcatatccttgcccaacatcacgaggtttgtacgttcgtatttttctgtttttcatttcctccactcccccgcctagtcttattcataaatactaatctcttggtttgcctgcttttgtgcttttttcaaagctgtttctaaatcactttgtcccaaaaaggcgcttaaaaactggttattaaagttattcatgataataggtaaatacggaccgtcttgccagacagtagcataagcagctccttttactaatggacctcgttttttgtcttcagcaaaaccaagtttatccgctacggattttcttgttggcaatgcgtaccccttacttgtccaagtttccattccttctttaccagttaagtactgaatgagctcccaagacgcttttttcttcttcgagtcagcattcattacatacgccaccgtaaatgccatcgtatttttatgaccgtttattgtcggaacttctgctgtaccgtaatcaagttttgggaaggactcttgtagaaacggaatcatccaattcccttcaattaccatagccactttttgttgtgcaaacatgtccgtacctgagtttgcgcctacatcagagggttgtacagacgttttatcttttaaatgctgatcaatgagcggctgaagagcgtcaacgacttctttcgtagcaaaatttgccttattgttctttaccacgtctcctccgtttgcctgcgccatataaaagacacgtgctaattccggcgtgaccccaaacgcttgaatccctttctttttaaatacttttgaaacttcttcaaactcatcccatgtttttggtacttctactcctgcttctttaaatagctttttgttgtaaaataagcctaatgtggagtaatcttttggaaaaccatatgtctctccatttttttgaaacgctttcaataatggtttctcaaaatcttgaacatcaaaatcagactttacataagaattcaaaggttctaaaactcctgtattaataagaccaggcgcttcaagtgcatccagataaaaaacatctggaccgtttccaccgattaaacgtgtttttaaaatatccatgtattgatcagtgattacttcatgcttcacatgaatggaaggatgaagattttcaaagtcttgaatagtttgattaagcagctttgtttctgttgggttgcctccccagccggccaacacaatttcgacccgatcattttccccagaaacttcttgtacgtttgaacatccagttaaaactgctccggtcactgccagcagcagacataaagcaagtatccacttcttcatcggttgtctcctttcatttcattgacctgcggcttattaagtgacgcctaataagccgcagtcgaattaacctacatgagctcttactttacattgagatagaagctcgtattttgtcgtattttccttcacgtaaataatagtttcgcttccttcttttttaaccgttaatgatagttttccactgccaatcacaaggttttctacagagagttcattcatatcgtctatgagcacaggatttatctgtatcgtacctgctgtactatcaggaaacagtctcagcatcgcctgcacgaaagctaaaggcgtgccggctgcccaagcctgaggtgaacaagcaacgggatatttaacaggcttatcaagtttacttgaatagccgcagaataattctggaaggcggtcgtattcaaaatgcccagctgcatcaaccagcccttttataattttattggcttctgtttgcttgttcgctttactcaaaccaagaacaattaaactattatcatgcggccaaatgctcccgtcatgataactcattggattatagcctgcttccccttctgccattgtgcggataccgtatcccgaaaacatagattctgatactagcctttctgctactttgttcagcttctcctcatccatcatctcggctaaaagtacatgacctggatttgacgtaactgttcctacttgatgtttatgttcatcgagtgcaattgcgtagaatgatacgtcatccatccaaaaggcttcattaaactttttacgcagctgctttgcttcttcacgtaaattatttgcttcatttgttttgtttaactgatcatataaagaagcaatacccatttttgcttgatatacatagccttgtacttccactaaagcaatgggagtttttgcatattcaccgctgcgatggacaacagaatctcctgagtctttccaaccttggttagcaattcctttacttgactcttgatgatattcaagaaataaatcgccgtctcgatccccatattcgttgatccatgtcaaagctccatcaatagtcatttgcatttcttgtacaaactccaagtctcccgtccactttacatattccgttaataaaattaaaaacaatggcgtcgcgtcaattgttccataatacggcgtaaaagggatttggtttgtgttagcaagttccccgtaacgtatttcatgcataattttacccggctgttcatcacgccatggatcatttgccgttccttgatacgctgccatcgtacgcagcgttccttttgctacttcgggattaaaagccagcatttgaagcgctgcaattagactatcccttccaaatggcacgccaaaccaaggcaaccctgctactggaaagacaccgaatcctacgtccgttagcagtacgcgcaggtcgttaagtcctcttgtaataagacgctgcattgtcggatgatcggttgttacttttgtagaagattttccccattttttatatgactggcgtagtaaactaaatgcttcaccggctgataaaatatcctcattggtgtcttcgcccatttgcggctgaaccattaatgtaatttcttcttcttcttgatgattgagttcaacagaaaatgtaatctctccttgctcatccacatatgaagcttttttatcccaaagaatccgtgtagcccgcttgatatcatctgctcctttgtatgtatatgttaggctgctttctccttttatttgccccgttcgttttccgacatttccagtttgaaaacctcttacgatgaacatatcgttaaaatcgacatctgcttgcatacttaatgtaaaagcaatttttttaggaaaatagctttttaactttattttttcatagaaaacccctccatatataaagcgttttctttctatttctaaagactctcgccatagtacaagctctccttctttttccatatgcggattagtaagaagaattgtggctaatagattctcctctgcacttgaggtcaataatacaggatctgcatcattaattttcaaatgaaacttgctcaaaaaacgcgtatctttcatatataatcctaaaccatactgatggttttcgttgatatttcctgctgaatcagtcagtaaaaataagtcattttctttaataacacggtaatccattttcatccccctaagttttaccgaaacgtttcggtttttacattatataaaaaccactagttgtggtttttagctgttgattctcgaatgatcagctttgtatcaagataacgcttcatatttgtttcttttccttctaacatctcaattagtaaatctgcagcttgatagccaatttgatatacttcctgtcctacagtcgtcaaatttggagacgagtaagaggcaaggacaatattatcgtatccgacaatcgaaatatctttcggtacttgaaggccaagttctttgcatgcttttagtgctccaagtgccattaaatcacttgcacaaaaaatagcagtgacctctttatgccgatttataagctcccgggcagctttctctgctttcttttcttcaaaattcccgcttacaacccactcagaatgaaacgacaaaccgcattctttgagcgcttctctgtatccgttgagacgttcttggctgacaaatgcgtcttcatgtccgttaatcatcccgatatgctgatgaccaagactcgctaagtgttcaactgcttttttagctcccaaggcattatcagtcgtgacatagcccactgaattagaatgaacgggaatatcaactaaaacacaagggatatcgctttctactacttcttttaaataaggatcttctttcttaataccttgaataattgccccgtctacccttcgctctcgacaaagctgggtatatgttttttctcgttgcatcatcgtgtttgtattgaataaaatcaaatcataccctaaagtagatgctcgctcatttacaccgcacagcacttcaaatgtaaaattatcttttacgctttctctactgatgcctgaaaccaatagtccaatagtctttgacttttgcataaccagtcctcgagctaacgtattagggctgtagttcagctcttttgctacggctgcaatcttttgccgtgttttttcatttacatctgaataaccatttaaagcccgagacaccgttgttacagatacgccagcaactcgcgctatatctttaatcgttgtcacctaaaattcctccaaaacgtttcggataactttaaatagattataacgctttcatttattgaattcaatactttttttaataatcagtttactcttatctatctctaaaacttttgcgtataaaaaaagcagccctaaggctgctctttattcacaaagtggaaattcaagtgaaaaacacgtttcttttccttttacgctagacacactcactttgcccttcatataatgaataatgctaaaagataccatcgttccaagcccggtacctttttcttttgttgtaaaatacggttcgcctagccggttgatttgttcttgtgtcatgccgcagcccgtatcaataatatccacgataacagctccgccttcttttcctactttaatagttaacgtgcctccgttttgcatcgcttcaatactatttttaaataaattgattaaacactgctgaagctttcttctttctcccataacgaagcacttcacttcttcatcaaatgtaaaatcaatcgcgactccattcatatttgcaagaggagtcataatatgggtgacgtgatgaatctcttctgaaatattcattttttcatttcgttctggtgcagaattggcaaacagcaagtaatcatcaatgatttcttttgcgcggtctagttcgttaatcgcaattgaaatgtagcgttttttagcaggttctttttcatcttcttgcagcatttgcataaatcctctgcttgccgttagaggatttcgcacctcatgagagatgctggcagctaaatgactgacaatttctagtttctctgctttcatcaggcgttgcagcactagtaaatttgcccgtatcgcttcccacagtatggtaattacaaacatgcctgctacatctaaaatcgcgaattgaacccacacgctaataggaatgctcgttacgtgcaagacaaaaatagatacaagcatagctaataaagaaccgattatactaagacaggtgcttacgataattctattttttaatgagaaatttaagaagtattttgttatgaaaaataaaggaatggataaaatcggaagagcgattaatgttgataaaaaccctacatcgtacccgccaattagcaagcgcagcagtaaaataaagacaaaaagcaagcttccaagcggccagcccccatataacgttcctaaaatataaggaattcttcgtagatccattcgatagtcatccgggacataagctccgttaacgggaaacaaaaggcaaaaggtaatggctaaaatcggaaataccgcgatataacgatctttccaccaatgaatttttttagcatacttgattaaataaaacatctgcactaaaaacagcgccaataaaataaataaaaaattaattaacaaatctttcgtgacaaaactcatgcattcaccggtctttcaaatgagataaaaataaactcttttattgcatttacatttgtaacacaaattagagcgtaatcatagataaataaacgtattctatttacttttttataacttcctatgactttatcgtccgttccctaaaatagtgaaggctaagaaaaccttttcaactccactaaaaatattcagaattttatttacatatgagctacaatgctctataatcagatcaatgtacttggttttgagagtaggaggacgaaatatggaactatcaattaccctaatgggattattcgttggaacccttgtaggcttaacgggggttggaggtgccgctttattaacacctttactgattgtactcggcatcaacccttccattgctgtaggaacagatcttgtctacaattctatcacaaaattattcggagtcgctcagcactacaaacagcgaaccattaactttaaattagcaaaatatttagcctttggaagtattccgagcgctgtgctggctattgtcacacttcatgcatttccatcttttcacgagcatcaagaaacgattattaagcacgctcttggatatgtcatgacgctggttgccatttcaattatctttcgcgtcttttttgataaattaattcgcccaaatcggtttcaggaaatggacttaaatcagaaaaaaggattaacaatcggaattggcgtagtctttggattcattgtcggactaacatcgattggttcgggctcattatttgcgattgcgatgctgtacttatttaagctaaaaacatctgagctggttggaacggatattgcacatgcgtttcttctcgttacggtggctggtattttaaatgcaagctttggaagcgtggattacatgttgactgctaacctattaactggatctattccaggtgtgttaatcggaagccgtttatcaacgaaagtgccttcaagaccgcttcaagccattatggcaaccatcattctaattagcggaattaaattaatttaacaaataaaagcacatgcctttgcatgtgctttttattagtttttttaaagatttgtattaaaaataataatgttttaaaccactcacttcccttcttatacacttcaactaatatttttattgaattttagtcaaagagaccaatgacacctcaaacaaccttacgttaaaatgtaaaaaaacataacatctgttgtgatatccaaaaaattgtacgacgaagggagaacacatgacacaaacagcggcaaaaagtaagcaaaaacctttttataaaggtcttttctttcaaattatgatggcaattgtacttggcatagccgtaggatatctatggccaagctttggaaatgctgtgaaaccgattggagacggttttattaagcttatcaaaatgctgattgctcctcttatttttggagtagtcgttgttggaattgccaaagttggaaacattaaaacagttgggcgtatcggcggaaaaaccattctttacttcgaaattgtcacaacattcgctctattgatcggtctattagtagcaaacgtaatgaacccgggcaccggtatgaatgttgatccttcaagcttaaacacaagcgaagtggacgccaagacaaacggctccgaacttccgagtgaaggtgatttttttcttaatatgattccagatagtgcagttggtgctttttcaagtaactccatgcttcaagtgcttttaatttcttgtttgtttggcatcgcgcttgtccatataggcggaaaaacagcagagacccttttaaatgtattggagaaagtaaatgatgtattgtttaaaattatgggatacattatgaaattaacggctcttgccacgtttagtgccatggcatttgcagttagtcagtacggtcttggaacacttgctgcattcggaaagctatttatcgctatgacaattgcttgtctagcatttgttcttgttttagctgttattttacgaatctatttaaaattaagtttgtggaaagtcattctatatatacgagaagaaattatgctggcatttgctacgggttccactgaagccgttatgccgcagctcatggataaattcgaacaagcaggatgcaacaaagcagtcgttggccttgttgtacctacaggctattcatttaatctagacggtgcttccatctacttgtctcttgccctcgtctttttagcacaagcaacaggcgtggatttgagcctcactgatcagcttttaatgcttggtgttcttcttcttacgtctaaaggaatggctggtattccaggatcagcttttgttgctctctctgctaccgcagcagcaaccggctccattccggtagcagccgttgctctgatgctcgctcctgatcgctttatggggaattaccggactacagttaatattattggttatgcggtagctgcttttattatcgcgcgatgggaaaatttactagatctacaaaaagcaaatgatgtgctggacggaaaaattgcgtatcagcccaaaaatgctgcaatttctctcccagagagtattccagccgccaatgaaaaagcattttaataaaaaaatttcctgtccgagacaagtctattttgcttgtttttcgggcaggaatttaattgttacatgaaaggccttttgctgaaacttattttcttcaagtattttatataccatttgtttaatcgtttcttgcgttttggcatctgatgaaacggaaggctccatatacacatccagttctactctgtcttttgagtaaagggaagaattcacgccccttgattcatagcccgcttcagttaaaccgctgctgattttatgccaaatatccagtttgtccatttgtttaataacaggctttgcttcttcgtacacttgtgcttgctgagtcttggaaacttcttcttttttagtaaaaactgcataccctgaacctactactaaaaacgtcataatagcaaatgctcgcatccttttcattctctcacctcatttagagatatagattataaatatgcgaataattgctgcagtatgacggcttgtatctctacttcttttctacgatactcagcagtcgtttagaaccagcttctgcttcttctatcatactgtcaaaaagctcttgcaccgttggaatactatcaatcagtccaacgacttgacctgcccatccatagccttcatcgattttattttcataaatataccggcagtttgccactccgctaatgacgtcttttaactcttcgtacctctctccttgctgctcacgctcaataatgtcaagggtatagtgagacttcaatacgcgtccaggtgccccgaacgaacgtttaataactacagtatcggtttcttttgcttctacaatagcttgtttatacgcatcatgggcatctacacattcttttgtcgcgataaaacgtgttcccatttctatcccttcagcgcctaatgataacgccgccaataatccttgtccgtttccaatccctccgcttgccaaaaccggaattgacacagccgcagctactcgaggaattaataccattgtgcccagatcctcacgtccgatatgtcctcctgcttcttgccccactgccatgacagcatctgctcctagcttctcagctttttgagcttgacgcacgttggctacaagcacgagcgttttaattcccgttccttttaatctctcaaaaataggtgcgggatttgctcctgttatggaaacaaccggcacgccttcttctacagctacgtcgagaaggtctttataagaaccttctgtttgacctccaacagcaaaattaacgctaaaaggacgctcagttaaagaacgtactttcttaatttcagctcgaagtttctcaggtgttcggagcgtcatagctgtgatttgtccaagcccgcctgcatttgagacagcagcagcaagttctgcgtacgctaaataagccagacctccttgtacaattggatattgaattcctaataaatctgttacccgtgttttcatctatatatcccctctccttttattttcttatttatgaatacttattcataatcataacaagaaaataacggatttcctacgaaaaaattccaacatttctgtttgcttcaacttttgatagggtacacattttgtaatgattattaactaaagatcaaggaggaaaacatgtatgacaaaaaagcaccctgtaaatgaaaaaagcaagcaagaacagctcgagcagtttaaaacagatgatcgaaaccaagcgctcacaaccaatcaagggttaaagctttccgaagatgaattttctttaaaagcaggtgaacgtggtccaacccttatggaagactttcatttccgtgaaaaaatgacgcattttgaccacgagcgcattcctgaacgcatcgttcatgcacgaggcttcgctgctcacggagaatttgaactgtatgactctctaagtgaatatacaaaagctaaatttttacagaatccgtctgtaaaaacacctgtatttgtccgtttttctactgtagcaggttctaaaggttcagctgaaacggtgcgcgacgcccgtggttttgcaacaaaattttatacagaagaaggaaactatgacttagttggaaataacattcccgtgttctttatccaagatgcgattaaatttccggatttaattcacgctgttaagcctgagccacacaacgaaatgccgcaggcagcttcagcacacgatacgttttgggattttgtcgccaataaccaagagtctgctcacatggtcatgtggtcaatgtcagaccgtgcaattccacgcagtttgcgtatgatggaaggcttcggcgtacatactttccgcttagttaatgcagaaggaaaagctcattttgtcaaatttcactggaagcctgtgctcggaacgcattcccttgtttgggacgaggctcaaacaatttctgggaaagacccagattttcatcgccgcgatttatgggaatcgattgaaaacggagactatcctgaatatgagctaggtattcaaatcatagatgaggaagatgaatttaaattcgactttgacattctcgatccaactaagctttggcctgaagaagacattcccgtcaaattggttggaaaaatgaccttaaatcgaaatgtagacaacgtatttgccgaaacggaacaagtcgcattccatccgggacatgtggtaccgggaattgatttttccaatgatcctctcttacaaggaagattgttttcatacacggatacccagcttattcgtcttggcggtccgaattttcacgaacttccaatcaaccgtccagtatgcccgtttcataacaatcaacgagacggttacggacgtcaaacgattaacaaagggcctgtcagctatcacagaaactctcttgcagccaataccccggctcctgtaccagagtcagggggcggttatgctcactatcaagaaaaagtggaaggaagaaaagttcgaagccgaagcgaaagttttaaagaccacttttcacaggcaacgctattttggaatagcatgagcgacactgaaaaagagcatattatcagtgctttcagctttgagcttggaaaagtgaaaagcaagtctgttcagcagcaggtcgttgatatgtttgccaacgtcagtacagtgctagctaaacaagtagcacaagcgattggtgcaacgcctccaccaggagaagacgcgccagtgaccaagtcatctcccgctcttagtcaggaacagacgattaaaaagccgaatacgcgtaaagtagctgtcattgtagctaatgactttagcggtgacctaccacaagtgttaaatagtttaaaacaacagggcattcagcctgaaattgtaagcacaaccctccaaaacgtgaaaggaacagacggatcagaacttgaagtacagcacacgttcttaacaagtgattctgttttattcgatgcggtttatgttgtcggaagcgcgtcggctgatgagaagtttcgtaaagaagcactgacatttgctcaagaagcattcgagcattttaaaccaattggcgcgacggatgaaggtgttaagtggctaaaagctgctggtttagatagtagtcccggtgtcgtaactggagaaactacacgctttacagatgaatttattgaagctatttcagctcaccgccactggaatcgtcacgttatataaattacaaaaaagatagggacctaccctatcttttttatatgaaatcacagtaattgaagaaaagcttctcttttgcttatactagataatgcaccttagattttcaggaggcagaaagaagacatgctcacaaacaaatcatcttactttttacaattaacgaaacgattcaaaaaagctgcaacggcaaattcagttatccttggaattttgttagctattgtgggaggttttcttgatgcttatacgtatataagcagaaacggagtattcgcaaatgcacaaagtggaaatatcgtcttattaggtgtaaaggcagcgcaaggtcaatggacagaagcttttcttcatattccacctattgtagcctttatcctaggcgttgctgtaaccgaaacatttaagcagccgcgatttgtatctgtactccctgatacttctcgtatcgtattgcttttagaaattgtcgtactcattatcgttggttttttaccgtctagtgttcctaatatgttggttacagtaacaatttcatttgttgctgctcttcaagtttcttcatttagaactttgataaaatggtcatataatacaaccatgacaaccggaaaccttcgtactgcttctcaagcagcatactatgctatattcaaacgcgatgaaaatgctgcttatcagtgccttcgttttaccgccattatcctctcttttttgagcggggcattgttaggttctatttctactttcaccctggggacaaaagcagtttggttagcttctgctattctttttctcgcttttgtcattttaaattcagaatctcaaaaaaacctttgaaatcaatgatttcaaaggcttttttttattaaactgattttctaaatgccataacgtgcaaatcttttaccggataaaaatcgttatcaggaaagcgaacgtaacctcttttagtgtacagcttaatggcatgttccattgaatgatctgtatgtaaacctaaataagaacaccctagctcccgagattctttttcacacgcttcaagaagcgcgttggcgactcctttccggcgatgcgacggagcaactgccagcagacgaatttcagcccatggaaatggctttaacaatcctccgtatacatccgtatttgggggataaaacaaaacgcttcctgccatttctccattgatttcagctacaatgcactcaaatttcttttcttcactcagggtatgtaaaattccctttcgatatcttttccagtgtgcttctgattttacagctgcatattgctcataagcagcaagcgtcactgtttcaatagatgatgtttcttcttctctagcttttcgaacgatcaattttttctcctccatttaccttcttcgttaattcttattgtctatggtgaaccatgtttatgcaacacatttgcatcttaaaacagcttcctttgcatatatttaatccgttcattatggtttctaaagcggtctttgtgctgaaactctgcttgtcttcatatacatataaagagattcatagacaaggatgagacagcatgtataaaaaattgattgcaattggaattggcagtgtgtttgttagtattgggattaacgtttttattcttccgcttcagcttgtaacaggaggcattaccggaattagcttaatcattaattatttacttggctataaagtaggtgtgatgattttttgcttaaacttgccgatttaccttctcgccttgggttttaaccgctcttattttttaaatgctatctatggcatggttctctcagccgttatgattgatttgctgtttccgcttcacgggatttttcaccttcccattatcttaagcgcttgccttggaggtgtttttaacggaatcggaaccggcatcatgctccggcagcacgcaagtcaaggcggggtcgacttattttctctgatacttgcgaaatggttatctttaaaccccggcatcatcattttagtgattgacgcatctattattatttcaggtattttactgcttcaaaacgatacagctatttattcattattcattgttgtatgctctggtatagtgaccagtttaattacgtcattcaaacgcatcatcgtctatgtataaggaaaaagcctcgagacatgcgtctcgaggcttttctttatttgtcatttaagaattcttgcagcgcttctttatttttatctaaatcaatatcaagcaccataccaacaccgctatacgttttgttttcaaatgatccgtctaacggcagtcgcaggctttgaacatctttcatgtttcctgttaccacatctttagccagaagcatcatgctttttgtatctaaatttgtatcgatgtaaggatccattacgccgagaagcttcggtattttaaacacgctgtttaggcttgctacttcatctttaagctttaaaacgacttcttgctggcgctgaacgcgtccaaaatcactcatgttatcatgacgaaaacgtacgtagccaagcagttgttcaccgtgtaaaacttgagtacctttgtgaagcgtcataccaattcccgaagacatgtcgtgaggcacggttacttcaatgccatcaggtgcaatcgtatctacaatttttgaaaacccttcgaagtccacaactgcataatagttaatatcgatatcaaaattttgtttgatcgttttacgcagcagctcaggacctccgaacgcgtaagcagcattcagcttttgcttgccgtgtcctggaatatccacgtacatatctctcataagcgaaacaattttcgggtgtttgcttttagaatcgtagtgagcaattaaaatagagtctgtacgagaatgcttttccccgcgcgagtcacttcctaacagcagcatatttacttctccgttatttgggagactgccttgaaactgttcaaatgtcgtgccgtcatccgcaaatttaccatcgcttgccatcgatagcccttgcttatattggaaatagctgtatatgcctccaacgataataaaaagaaacaacaaggcaaagaacactctgccccatcgaactcttcttcttcttttgcgtcttgttcgctccacgtttctgtcaccagctttctttttcaatgaagttctcataaaacaagcaagtagctaagcttttaaaaagctcctctacttgcttgtttggattgtatggtgtgaaagcttacattacttttctgtttcttggtcttttccatacatatattttgatggatcgaccgctttaaagtcatctaatttattaaatcgtaataaatcaccgtataacactttatcagaaagttctagctctcttccaactttctttttataagctttcgcttcgtctgttgctgtgattctttctcccgtgtttgtatcgtaatacttgccgtcaattgacgtgtattttggagaaacataatcaccgtttctaaatgctactacctgatcatgatcttttgataataaatctgtaccgaactgaacatactctttactatcaattcccactaagtgaagaagcgtaggtactacgtcaatttcaccgccgtacgtatggttcactccaccttttacacctggtacgtgaaggaagaacggtacgcgctgaagctgagcgtttttatatggcgtaattttctcgccaagaactttttccattgctttgttatgattttcagaaataccgtagtggtcaccgtaaatcataataactgagttgtcatataagcctgaagcttttagctccgtaaagaattcttgcagtgattcatccaaataacgagccgtttggaaataacggtctaccgttccatctcctgtgtttgccggctcaatgctagcatcgcctttatcaaggacaaatgggaaatggtttgttaatgtaatcatatgcgcatagaacggctgcttcaatgactgtagcattggcatagattctttgaagaatggcttatcttttaatccatagtttactttgttatcaccagtcatattgtaataacttgcgtcaaagaatttatccacaccgaactgcttataaatttcattacggttccagaacgttttatagtctccgtgtaaaacggcacttgtatagccgccctcttgatctaagatcgctggtgctgcttggtacgtgttgcggccttttaagctaaatgccgatccttggggcaagccgtataatgacgtatccatcataagctctgcatcagctgttttaccttgtcctgtttgatggaagaagttatcaaaatacataaattcatttccatttgctaatgagtttaaaaacggcgttacttcttgcccgtttaacttatagttaatcaggaatgactgaaatgattctaaatgaattttaataatgttttttccttttgctttaccggcatactcaatatttggagctgcatagtgacttgtactgaagtttttcactgttgttaagtcatcactgcttgcgaatgctcgctgctttgagtttttaaacgtttgaactgcatcatacaccgtgtagttgtatgctcctaaatatttcactaggtagttgcgatcaaatgttcttgttaataattcagggcgatctttttcagcatagtgcaagttaattgcaaaagcgatagctcctgccgctagtaccatgaacgtatagcggaatttaaggcgtgcttttggccattcgatttttctaacaaacaatagcgcaatcagtaaaataatatctacaaagtaaaaaatatcgtgaacttttactaaatcagcgatactgcctcctaaatgacccacattgcttgtttgcgttaaagtaggcaatgtcacaaagtcattgaagaatcgataatataaaatattgctgtacaaaatgaccgtcatgatggtactaaggataagcgtccaaacgatggctcttttcccttttgcaaacaatgctaaccctaaaaagatcaaagttgaactaattggattaataaacaataacgttttttgcattgagtcacttatatctaagttgaactccactttgtaagacatgtaagacttgatccacatgaataaaaccgctataaaaaagtaaaacaacggctttgaaaatagttttttcattttcaaattcctttcactaaaaagtagagatttcatgttcagctaacctcaggaaaatcccctacattaaatcgtaacggttacgtcctgcaaaagattacctgaaaatgattcaatttgtcaaacaatatcatcttcatctctttttttagtcatctacaaaatttacattttaacttgtaatctcttatttttttatcgtgatgttaatattacacaattgttaatttgtaaattttgttctccctatattgcatacatattaatttaccacatttctgctctgcaataaaagtatttttatattattaggcataatatttcacttactgaatgaaaaggtactattgtactggaaggtattcttcccttactgttaggactagtaaaaatagactgatctatgcttagtctttatctttctcaacagctatgcggtctccttgtgcaaagggctgtgaaataacaagaaactcaatctcttcactcgaacgattcatcatttgatgaggaatggacggaagcacttctattccttcatgggcttttacatcataaataattccgtctacttctagagcagctgttccttttagcacgaagaaaaattgctgtgctctcgtgtgattatgccttacctctttcgtatgagggggcatgcgctcatgaataatacttacgtctttatttttcactaggtgccacccatcgcattttcctccccacacgtagtgttctgcgttttgcttactgactttcatgactagctcccctttttctaataaataaagacctgcagatgaaatagaaattctatgtgatctttttaaccttgctatcagaaatattttttagatgaaggttttggcttaaaagtaaaaagcattcctaaaaagatcaaaacaatgcctgccagctgaagaagcgtcgggcgaaatcccgtgaatgctgtatctaataaaatagcaacggctggatctaaaaacactaaaaccgaaatcacctgagtttttaaatagcgcaggctgtcgaaaaacaaataatacactaaaccagtatgtacaaagcccgttaccaaaatagctgtccaattggccgctgttaagaaatgaaaatcactaaaatgaacaaacggcaataataaaaaaatccctaaaaaagtctgaagaaatgtaacagcgtaagcactcgtatgaatgattcctttgccaagcagcgttgtgcatgcataaaacaaagcggctaaaagcgcccacagtattcctgacgacatgaagccatcaatcgtaagttccttcactccaataatcagaagtgttcctacaaaacaaatgaaaatagacataatgccaagaaccgttaatttctccctaaagataaagcttcccagaagcaatactaagacgggtgcaagatgataaatagaaatagctaccgtaacggacatcatttcaaatgctttaaatagaaacacccagttaaacacaaggaatatgccgcacagtaaaatctgctttatttctttggcattccatttttctcttttatattcacctgttacaaaccagcacattccgagaaaaagcgttgcacaaatacagcgaacaaatactaaatcaaaagaaggcagtccagtttgtgtggagaaaaacccaatcgaaccaaaaatactcattgaaaccatcatttttaccatggggcctgctttcatttttccacctcgctttcagaaaactattattattcaaacataaagaagttcatttgtaaattaatggttcataagcgctgttccatgaaaaagcaaaaagcgcaaagacacggggtcagtcccatcgtctctgcgcttttctgtctttcttttaatcttcaaccgggaaccagcctggtgtgttaataatggcttgccacagcgggtcaggaatcacaagcttttcctgatcttttttgcttaatgttgtcacaatttcattttcgcggccttctttgactttttgaacccagtctggatccataattaattcacggccaatcgcaagcagtggaatgccggtttcaagagctgctgctgcttcgtctgctgtatgaataaaacctacgcccatcacaggtacgcggcttcctacgcgctcttgaataatctcaatacgtgaacgagtatcttccacgcctcggcgaggttttgaccagaattccattagcgatacgtgaaggtaatcaaggtctttttctgctagtgcatcaactaatctcagcgtatcagccattgtaattccaggcgtctcaggctcttccggcgagaagcgatagcctactaaaaatggttcttttgcatgtttagaaacagcttgctttacttcgtctacgatcgctagtgggaatgttaaacgtttttctacgctaccaccccatttatcttcgcggcgattagaatgcggagaaaagaactgctgaattaaatagttatttgctccgtgaatttcaactccgtcaaatcctgcttcaatggcgcggcgcgtcatctcaccaaaatcgtggataatgccttcgatttcttcattggttaactctctaggcaccggtgctccttcttgttctgcggcaacagcgcttgcgctaacaacctctccatttggaacaagctcaggcggacacatgcggcctccgtggaaaatttgaagaactgcttttgccccttgatctttaattgctgttgctaagcggcttaggctaggaatcatttcatcgctgtctgcagcaaactctccgtgaaatcctttgccgtttggcgttccgtatgtacatgctgtaatgaccatgctaacaccgtttgaacgtcgtacatagtagtctacttctgcatttgatactgttccatcttcatttgatgaaaaatttgtcataggcgcaagaataacgcggttatctaatttgatgccatttgaaaaagtaaatggctgtaaaagcggctcatactttttatttgtcattttgtttccctccaaaaatgatacggtcaaaaatattggcatgttataggtagaaactgtttttccttcctataatatgtgtcatttaaaactgtaactttaaaatatactgtaattttaatatgtacaattttacctgtcaatgaatttgacttttgccccttctactaaaaaatgacgatatttataaaattcacatgaatttggactacttttcattccagctcaaatcattaattatcatgaagctttttcccaaaaaatatgtataatatctcacgaactttttgtctacttaatacgttgtaaagataaatttgaaaaggagtgcaaaaaatggcttttccatctaacacccaattccaacctatttttataggcaatcagcctatttatgatgtagtaggtgacgaatctccagcctccacagatattgtgggaaatacacagttcccagctgcatttgctgcttatgatggaacaactatttatttccgaattcggctgaatagtgatccgcgaagctctaaaaatacaggttttagtaactttgcatggggcgtcttgattaatacatccggagaccctggcgtctacgactggttagcaaacgtaaatggattagataatacaatcaatcttgttaaaaacacaacgcgtgtattcaattcatggaatgaccctgccgaaggaacagatggacgcggttcccctaccttctcacgtccgattgttaattttgatgtagctcgcgtcacggtgacaaacgatgggtctaatttcggcggagatgccgattattttcttgattttcaatttcccgctgctgacttttttcgagttttaggaattagtactacttcaccgctgcaatttattattttctcctccgctaatgcaaacaactacaataaagattctttacaaacgtctgaaggctttcaatttgttaacgcattaacaaatcctgtcgctcctcaagatgtggacgtccgtgctaacttaactgcagccaagaccattacttcaggacctacatctgtttttacaggctctctaacaacttgggcacagtctgttactgtgacaaataacggtcgggctctcgcaaggcaagtggttgtaaatgacgtatttagtctcgaccaattttcaagtataggcagtataaatacatcagccggaacaacagtctttaattcaagcaatcgaacgctgtcttggacaatagggaacctggctgccgggcaaacggctacgttaacgtacaccgtaattgggacattcactacttctggaacaaggagacttaatacagttacagcttcggggactgatgacttcacaggccttcagttaacaaatgcaactgcttttaataatattgaagcagctgcagcagctgctgttacaggaaaagttacatctggtcaaactggattacctcttagcggggtaacggtcgaactcagaaatcaaaacaatgtgctcattactactactcaaacgaacgccgtgggaaactacagctttactcagcttgctagcggaacgtacacgcttaacttcatcgctgctaatttcgtaactgctacgcgcacgccaaccgttcctgccgggcaaacacaaatcatcaatgtgactcttcagccttcccctgggatagtaacaggcaccgttacttctacaggaggtacacctgttgccagtgctactattaatttaattgatgcatttaatacggttgcagcaaccgcgacaactaacatacaaggtcaatatacactttcaaatgtcaatccaggccagtattccgtgaccgtcagtgcaccgaatttccaatcacagttactcggtattaccgttacatccaatcagacgacaacagctaatttcaccctggctccttctccgggaattgtgacaggtgttgtatcaaatgctagcggaacacctattcaaggagccgttgtggaagttctcgattcaggaaacaatgtaatcgcaaccgtgacagccaacgcgcaaggccaatataccattaatcaacttgcaccaggcacatttcaattacgggtgaaagctcaaaacttccaaaccaccttgctgggttttacagtgcaagccagtcaaacaacaactcaaaacgttatccttcaaccttctccagggacgttgacaggtgctgtaaacgatgctcaaacgggcgtttccttgtcaggtgtttcagttaatgtagttaatcaaggcggtattaccgttgcaacagcaacaacaaatgcacaaggtcagtacagtgtgaccaatttggctctgggcagctatactgtcacttttgggcaacctggttttggcagtcaaacgattggagcaattattcaatccaatcaaacaaccacgttaaatgccgctctaaaccgtttagttggtgtcattaatggagtcatcacctccggtcaaggcggcgcgcttgcaggtgcagtggttaatgtatttttaaataacggcttggttgcttctgttacgacaaatcaagtgggagcgtatgtccttcctaatttggctccgggcagctacacggtcacagccatcgctcaaaatttccagtctaaagtagcaggtgcccaggttgttgctttccagacaacaaccgtaaacttttccctaactccagatcctggtaccttaactggaacggtgacggattctactggagcaaccgttgcaggtgctaccattaatgtcagaacgacagtcggcggtgccattataggttcagcagtaacagatcaaaacggcgtttatacgattccaaacttatccgctgagagctatattgtaacggcgaccgccttaaattttcaaagctcgagtcaaggaactgcgattagatccgatcaaacgacaacgctaaactttacgcttgcttttaatccggtaaccatcaccggaaccattagaaatcaacaaacgggtgactcgattgccggtgctcaaatccaagtacgaattttggatacaaacggatctgttatcgccactgtctttgccaactcagaaggtaactttcttgtcccgcaattagctcctggaacgtacacgctcgttgtgaccgcaccaaatttccaaacgagttttgcaaccatcactgtgtctccaggaggtcaagcaaatattgatgtttcacttgctcctaacccaggaataattaccgggcaagttgtaaacggcactacaggagatcctattgtcggggctggcgtaagtgtagttaaccaaagtaatgttcaagttcaggttggttttaccgatagtcaaggaatttatatgattgaagggttacctccaggaaattatcatgttgcagtgaacgcagctaacttccaaacgaacatagccgggggaattgtattagctgatacaaccacagttgtaaatgtgagcttacctcctgaacctggactcattgccggaaacgtttctcctattcagcccaatacagtagttgcgctttacagtgctaaaaatatctttattcaaagcgtattgacagatggcagtggaaactatcaattttcaaatcttgcgccaggtaattacattcttattgcgtcatctccaaactttgccgttcaatcagcaggagcaattgtttcttccaatacagcaaccagtgtgaatttcactttagttcctaacccttctattatttcaggggtcgttacggatacgggtggcgctgctatcccaaacgcttccgttcaaatttttgatgctaatgaaaccattctcgcaacagccggaactgacgcccatggtgcgtattcaattggaaatttacctccaggttcattttcagttcttgtaacagctccaagtttcgggcacttaacaagcggaattatactaagccccggcagtactttagccaacataaactttgctcttactccaaatccaggagcaatcagcgggcaagtcaccgatgttgcaacaggagcaccgttagctggttcaacggttgtcattcgtcaagcaatcggttcaggtgttgccgttgcaaccgtgacatctgattcgtcgggtaactttcttgtgcaaggattagcacctgggagttataccgtgatctcttcgttccctacgtttggaacaaaaacaatcggagcaattgtttctagtgatacaacgacaacggccagtattgcacttaacgaattagctggttcaatcagtggtcagcttgttgactcaacaggtacaacgattaccggaccaaactcgcaagttcgtttacttgatttaaatggtgttcttattgaagcattacttgctcaatcagatggtacgtttgccttttttaatgtttttccaggaagctacgtactaaatgcatcagcacctgcattccaagcgacgacgatcggaatacaagtgcaagcagatcaacaagttcaaacaagcgtcatacttcaaccatctcctgcaacgttgacagggcaagtcattaatcaacaaacgggaataagtattgcaggaagcatcgtatctgtccttaattcaaatacgggattactaatcggaagaggcgcgtctggtcaagacggaatgtttgttattgaaaatttaccggccggctcatttgttgcaagcgctggagcccaagactttggaacggactcgcgggctgtcattttatcgccgcgacaaatgaccactaccacacttacccttacgccagaccctggaagtgtgtctggttttgttgttaaccgtaataacggggatacccttgcaggagcaagcattcaaatttttgatcaaacaggcgcgccagccgtttcggtgtctgcgaatgctcaaggacaatttttagtatctggattagcgcccgggctctatacagccattgctgcctctgtaggatatacaagtggaaccattagttttaccgtagtttcagacacacaggccattgcaagctttgctttggaaccaaacccttcaaccattcaaggcgctgttacgaacggtgccactggtacgccgctcagcggaacagatgtaattattcgccagtttaacgcaaccggtcctattattgccacctctgttaccgacgctaatggcttttatacagcatcaaacttaccacaaggaacctttacggttattgttgtaaatgctgcttttggatcacaagcctcatccgtcacgcttgctcctggtgaaacagctgctttaaactttggcttagaacagcttccgtcgacggtacaaggaacggtaacagacgcagaaaccggagatccgattattaatgcgctgattcagttaattgatgcaaacgggattcttgtcacacaagcgcaaacggatattaacggtttgtatcaaattgcaggatttacggctggagattatacgattgcatttacaaacccgacgtttcaatctcaaacgttaagctttacttctcagccaaaccaaacgtctgtggtcaatacaaatcttattgcttctcctgggtcaattacagggcaagtgttggatgcagaaaccgcctctcctttaattggtgcgtctattcaagtcttccctgctcttgggttaaatccaatcgctaccctcgtaaccgatggtagcggtcattactttttagacgggttagcacctggttcttatattctaatcgggtcatttcaaacttacgcgacttcgtctactggcgtaacagttctctctaatgacacaagttcatctactattttcttagtccctactcctgccactgtttccgggacagtaagatcagatacaggcgaaccaattataaatgcgtccgtgcgtattttagatcaaaatgaatttgtgttgggaaccatcgttacagacgagtttggaaactattctctgaccgatttgccgcaaggaaatcaagaaattattgtaagtgcccccggatttgctacacagctcggcggcgttattttaattccagggcaagtggtaacgaatttgaacttcactcttacagctaattcgggaagcatttctgggcaaattataacagcggatacagagatgccaattgttggtgccatcgctatggtgcgagcagtcgccggagttcctgttgtggtggcttcaactacaacagatgagtttggaaactacaagataaacggcttacagcctggttcttataccgtcacaggctctgcgactggttatgcgttaaacacagtgggggcaattgttatcagcaatcaagctacccaagcaaatatcgttctttcaccacttgttggttccatttccggtaccgttttagatgttcgaggaaatccaattgtcaatatccccactcaaatccgtgtgtttagccaaagcggcgtcttacttcaaacagtagctgcacagtctgacggtacgttttctattacaaacttgcctcctggctcttatcaattaacggttacggcaccgaactatgcagccaatacagtgggtgcatttgttacagcaaacgaagtaaccttgcttactgttccgcttacacctaatcctggaaatgtaaatgggcaagtagtaaacagaaccacgggagatgctattttgagcgccattgtttcagtcactgaccttaacgggctgccaatcggcagtactgttacagatcaaaatggaaacttttccattccaaatctaccggcgacaaccattattgtatcagccgtagcaacaaattttggttcagactctcgttctgtaattttaacagcagggtcaacaggaactgcattattaaccttaacgccaaatcctggatctgtgagcgggactgtgataaatcaacaaacggatgccccccttattggagccactctccaaatctttgactttacaggagcacttgttgcaactgtcttgtcagatcgtaacggactttatcaaattcagaacctgacacctggcttttatcaagtgattgccacttctgcaaatttcggtacacaggtacaaaacgttgaggtaacctcaaatgtaacatcgacagtcaatctcgttctaacacctgatgctggatcgatttttggcacagtcgttaatcaacaaaccggagctctcatcgtaggcgcttcagtggtcgtaaggctattctctcctgctgggccagttgttcaaacaacggcaacagatagcagcggacaatttacagtgctaaacttgggacccggagcgtatgctgtcactgtatttaatccgaatttcggcacccagagcactacaacgtttgttcagtcaaatacagtttcaatcgtttcacttgcgctactgccaaaccctggagcagttcaagggctcattacatctgctcagactggggagcctgctctaaatacacaaattaatattcttagcgatgccggaattttagtagcaacggttcagactgatagcaacggcaattactttgtgcctggtctggcacctggcacgtatacactagtattttcaaaccataatttccaaagcagtactattggtgcaatagtaggttccgatacagttataactgtaaatacggcgttaacaccagacccaggaacgattacaggcacagtcattgattctcaaactggcttgccaattgcaggagcatctgtgcaaattttccctgctcaaagtttgattccaattgctagtgcgattacaggccaagacggaggttacaccgtccttggcattcagcctggagattacgtagtagaggctactgtatcaaattacactgtgacagcagttggaacaggggtatttccaaatacaccggcaacggctgctctgcttctttcaccaaatccagctgctttaagcggaaccattacctctaccaatggaacatctatcgctggtgccgccgttcggattattgaccagaatgaaactgttcttggcacaggagtcacggatcaaaacggacattttacaattggcaacttaccacccggttcacaaagcgctgtcgtttctgcctccgaatttggcactcaaatcattggtgtaacattatcacctggacagattattacagattttagcgctcagttaacaccaaactctgggaatattcaaggtcaaacggttaatgctcaagacggagcccttattgcaggcgctgacattgttattcgtaagacaggggcaagttcaattatcgttacaaacgcaacaacagatgtagatggaaactaccatgtaaatgatttagctccgggaacctaccttgtaacagctagcaaatctggtttcggaacaaatacggtaggcgtgatcgttgtcagtgatacgattgcaacggccaatgttccattaacagcacttgcaggtgttattagcggaacaattattgatcctcaaggcaatccgattacaggaaataatattcagattcaagtatttgatcaaaacggacatttaatcaagtctgttttagccaacagcgatggagcgtttactgtcgttgacttgccacctggctcttatcagttaacctttacagcgcctaactttacaactggcatattcagtgcaacggttacctctgaacaaacaattgttttagtggcgacactgcagccagatcctgctacggttacaacgcaagtcgttagtggagaaacgagtgaaccaattccaggtgccattgtcacgtttaccttgccaaacggaacgattgttgggagtggagtaacggatacgaatggatctatcagtattttaaacctcccttcccaaacgcttaatgtttccgtaacggccaataattttggaagcctctctcaatctgttattcttacaccaggtcaagtggcacagataacgatttctctgtctccagaagttggtagacttgaaggaactatagttaatgagctaacaggtgaaccgattgctggtgcaacgctaaaagtgtttgactttactcgaggaattattgcaactgtgatgactgacacatttggattttataaaattcagaatctctcttccgatgtgtaccgagtcattgcttcagctcaaggctttggttccaccgtccaagaagctatggtcgtcgctaatcaacaaaccgttttggatttctttttacctcctgatgcaggaagtattcaaggtacaattatgaatcagcaaaccggaagtccgcttgcaggcgtttcgattatcgttcgtcaatttacgccgacaggtccaattattgctgcattatctaccgatcaaaacggtatatttaccgtgaataatctagcacctggaacatatacggtcgttggattgaatccaaacttcggaagcgaagctgcctcaaccattgtacaatcagacagtgtatctaatatttcacttgcattaattccaaatccaggaatcgttcaaggacaaatcacaaatgctcaaacaggcgcaggattaacaaattcatttgctcgtatcttagatagcaatcgtgtcattattcaagaagtgcaaacagatggaaatgggaattatcgagcagaaggattagctcctggcgattatgttttaattgcagtggcgtctgactttcaaagagaagcaattgggttttcagttgtttctgatgcatctacaactgttaacgtcacactccttccagacccaggaagaatcacaggaagggtactcgaccaacaaaccggcttagctttggacggagccacagttcaacttttccctccgcaaagtttggttcctatagcaaacgcacttacagatcaaaatggaatgtttcaaatgggcggtctggcaccaggcgaatatattctagtagcaaatgcacgcaattatgcaagaggtgctgtaggaacagttgttttttcaaatgaaacagcagtggctaacattgaacttcaagctaacccttctaccgttagtggaagcattacgagcataaatggagcaccaattggaaatgcgagcattcgtgttattagtcaaaatgaaactgtattaggcactgccttaacagatcaaaatggaaactacgttattagtaatctacccccaggcgcacaaactattgtagtgaatgcacctgctttttccaacgagcttagcggtattactcttcaaccgggtgatgtattagaaaacattaatttttcattaaacccgaattcaggaaatattacggggcaaattataaacgcgcagactggtgaagccatttcaagcgcaattgttgtagtacggcttgtaggaggcgttggcgttattgttgccaacagcatcacaaacgaaaatggaaactactttatcggtggcttagcacctggaacatatacggttgtagcatctgaaaatggatttgcaagcataagtgtaggagcggtcgttcaaagcgatgaaacaagtttagccaatattagtctcattccaaatgccggaaaaattacaggaaccattacagatgctggcggcagccctgttctaggaatgaacactcaaattcaagtatttgatcaaagcggcactcttttaaaaacattgcttgctcaatatgatggaacatatgacatactagacttgcttccaagcagctacacattgattattactgttccaaattttgttaccgcaacaacgaatgctgttgtcatttcagatcaaacaactgaagcaaatattacgcttaagctaaatcccgctgcggtgactggtcaggtattaaacagcagtacaggaacaccgattaatggggctcttataacgattacagacttaaacggcatcgcagtaggatctggagcaactgatttaaatggaaactttaccgttttgaaccttccaccagctacgcttaatatctcggcggctacaggaggttttggcaatgattcaaagtccgttatcttaacaccaggcgaaattgaagctacaacattaagtttaacacctacaccgggcaccgttacagggacagttctcaatgcgcaatcaggggcccctcttgcaggcgcaaccgttcaaattttcgattttacacgagcacttgtcgccacgttgcaaacaaaccaaagcggtgtttatcaatatcaaaatctagcacccggctcttaccgattaattgcaacagcaaacaattttggagccgttactcaagatactcaagtaacttctgaagctaccactactcttaactttaacttaacgccgggccccggtactattacaggcagtgtatttaatcaacaaactggtgccccgattgcaggtgcaagtattgcaatacgccaattttctccttttggaccaatcatttcaactattacaactaatattcaaggtcaatttaccgtctttaatttgacacctggtgcttacacagcggtagcatcggaccctaactttggaacagaatctgcctctacacttgtgcaatcaaactcagtctcgactgttctactgaacttatctccagatcctggtattgttcaaggaaccatcaccagtgctcaaacaggtcagacgctagcagatatacttctgcgcatacttgatgtcaacggcgttcttgttaccgtatcacaaacagatataagcggaaattatcgcattcaagggttggcacctggaacgtatacaatcgtggcagcaaaccctcaattccagcagctcacaaacggtgttactattgcatcaaatcaaactgttacagaaaatatttcgttacagccaaatccaggaagcattaccggcacgatagttaatgcacaaactggcacgtcgctctccggagcagttctacaagtctttcaatctggtagtatgactcctgttgccaacacagtaacagatcaaaatggaagcttttcttttattgggttagcacctggtgaatatagcctcgtagctcaagcaacaaactttgggtcagcggtagcaggtgccattgtcacttctggcaacacaacaacaattacaattcaatccccaccgcttcctggtgttatttcaggccgagtaactgatttttcaagtaacacattatccaacgcaacggttagattactggattcaaaccaaaacgtaataggtatcggtagcacagaccttactggtaactacactatcggtaacgttgcagcaggaacgtacatcattattgcaagcgcatctggttttgccacaaatacgcaaggtgtaaccattgctcctgctcaagtgttatctaattttaatattcctcttgagacatctacaggaactattactgggcaagtaacaagtagtggagccgcaacaccagtcgcaggtgctacagttatcattcgctctcttcagcaagaaaacggcgggatagtagtaggaactgtaaatacggatcaacaaggaatttatcttgcacaaaacttgcctccaggaaattactccgtcgccgtcactaaaacggggtttggcacgcaaacacaaacattcaccgtcgctagtaaccagacatcaactgcaaacttcgctttattagcagacgcgggtactctggctggttttttaacggatataaatggaaatccaatcacaggatcaaatattttccttcgaatctttactgatgataacgtattactcaaatccgtcacggctcaaccagacggtacatttggggtatttggtctagatcctggaacgtacactgttattgcagaagcaccgaactatgcagcaaacagtattccaattacgatcacagccaatcaaacaaccactgtggctatagcattaacgccaaaccctgctacaattagtgggaatgttgtcaatcaacaaacgaacacaccgcttcaaggagtgacgatcactgcgtcttcaaacgagcaaattattgccacagctgtcacagatataaatggaaatttccagctaacaaaccttgcagctggtaccatcagcattgttacttttgcacaaaattttgtgaacacgccgcaaacaatagttcttagccctggtgagacgcaacagattatcctatcacttactcctcttactggtaccattacaggcacagtaattaaccaacaaacaggggaacccgttcaaggagcaagcgttgaaattcgacagttttctcccgcaggtcctatcgttgcaacaactgtgactgatgggttaggtgtatttaccatatcagacttacagccagcatcgtatactatcattgcacaagccacaaactttggaacacaagctgcaacaactactgtactgccaaatgacgtttcaaccgttaccattggactgacgctgttaccgggtaccgttcaaggaactataagaaacgagaacacaagcgcaccgcttgaagaagcaattgtacgcgtaattcgcagggatggaacagttgttgacgaagttctcacaaatgcacaagggttgtttacaataggagggcttcctgctgactcttacacgttagttgccattagttcaggcttccaaagacagaccgttggctttactgttgcacccgagcaaactacgacggttgatgtaaatttacagctgaacccaggaacgctgacaggaacggtcacagacttttttacaggaggcccaattgcaaacgctatcgtgcttgtctttccttcgcaaagcataacctctattgcccgaggaataacaaatgaaaatgggcaatatacaattttaaacttggctcctggagaatataatattatagcagtggcaactgactttgcacgcggcggtgtaggagcagtaatttcagcaggcagcaccacagttgctaatattcagttaacttcaaacccagcaacaatttctggaacagttacagactccggtggtaacgttataccaaatgggaccgtgcgagttcttgaccagaacgaaacggtattaggaactgccatcacagatataaacggcaattattcagttggaaacttgtcgcaaggaaccttaactattattgcatctgcacaaggattcgctactcaattaacggctgtcacattaacacctgcgcaaactttaccaaatgtagatattcagttaacagcattggttggtagtattacagggcgagttttcaacttggctacaggacaatcaattgttggagccattacagttgttcgaacatcaggcggaacaaatgtcattgtagacagtggtaccactgaccaaaatggccgctatttgattgaaggtcttgcgccgggttcatattcagttggagcaacagcttcaggctttggcacaacaacggttggagcatttgtgcaagctaacgacgctacaactgctgatttaggattgtctccgcttaccggaacagtttttggaaccgtcacaaacgtaaacggctccggtattacagattcgaatattcaagttcaagtctttactgcaactagcacactgttaaaaacactgcttgcgaatgcagatggatcatttaacgttattgatttagcgccaggaacgtatctcattcaagtaactgcgcctaattatgcaacaggagttgcaagcgtaaatgttcgagctaataccactacatctgtctctgttcggctcacgccaaatcctgcaactgtaacggggcaagttgtaaattctgttacttcctcgccattaacaggggtcatcatcaccgttacggatgcgaacggaattatcgttggaaatgctatcagtgaccttaatgggcagtttatcattaggaatctaccaccaaatacggttattgtaacagccactgctacccagcctggttttggttcctcctcgacatctgttccgcttgggccaggagcaactgggaatgttctgttgtcactcgcacctcaggcaggatcggtgactggaactgtacgaaacgcacaaacagctgatccgctgcaaggcgcaacaattcaaatatttaatttcacgagaggactggttgcaactgttgtcacagatcaaaccgggcaataccgtgctgataatttagcgccaggaacgtatcgagtcatcgcttcgaatcaaaactttggctcgttagtacaagaaacggatgtcgccgtaaacgaagtgacaacattaaacttcaacctctctcctaatccgggaagtgttgaagggaccgtctttaatcaacaaacggggcagcctcttggtagtgtaagcattgttatacgtcaattttcaccagcaggtccagtcattgcaaattcctcaacgaatggaaatggaaccttcaccatccctcacctgccacctggaacttatacagttatcgctactttaccaaactttggaacacaagctgcttcaactcaagtattttcaaatgaaacggcagctgttcaactatctttaccaccaaatcctggggcagtccaaggatttgtcaccaacgcagaaacgggcgaacctttatttaacacattggttcggatcgttgatacagacaatgtcgtggttggcactgtgcaaacggatattaatggacgatacagcatacagaatatatcgccaggaacctacactcttattattataaatcctgattttcagcgtcaaactctcggatttgcaattacatctagccaaacaacaaccattaatgtatcacttcagtcaaatccaggatctattgttggcattgtcactagcgctcaaaccggattgcctcttgtcggcgcaactgtccatatttccccatcccaaggattaatttctattggaaatacagtgtctgatgaaaatgggcaatatcgttttattagcattcagccgggcagctacacgatttcggcaaatgcaaccaattttgcaagaataagtgcgggtgcatctgtattcgctaatatccaatcgatagtaaatatttcactgcagtcaaatcctgcgagcatgtctgggcaaattgtggaccaagatgaaaacccaattcccaatgcttcaattcgggtgcttgatcaaagcgaaactgtgttgggaacaggtatttcagggtctgatggacgttatactgttcaagggttgccacctggcatccgtaatattgttgtgagtgctgcaggcttctcaaccgctacaagtggaataacactcttgccaggagaaagtctattggatgtaaactttatacttgttgccaacccaggcattttaacgggtacggttattgatgcaaatacaaacgctccgcttgttggagtgaatgtggttgttcgaaatctgttaggtgtaattgtaagttccggttttagcaatgtggatggtcgctatacgattcaaaacttaacatcagggcaatataccgtttctttctttgatgagcgttacgacgcggtcagcctaggagcacaaattacctctaatacaacgactatcttaaatgctacacttgcacgggcatctgaagcaggcaccgataaaacaccgagcattcgagggcaaatcgtagatgaacaaggagtaccgattaccacaccatttatcccagtaaaaatctttgataaaaaccttgtagtggttcaaattttacttgcgctatccaatggccggtttgaagtatttgacctggcaccaggaacgtatttagtaaatgctggagcatctgactttgcgtcaaacacagtctctgctattgtaagaaatagcgagacaacagaggtagtcgtcaccctcactcctttacctggaacattaaccgggcaagtaattaatggtgtttctggcgaaggaattgttggagcattcattaccgcgacaagatctaacggcgtcatcatcgcaacaggaataagcggagataatggatcattcaccattccaaatttaccagctggttcacttaatataattgcacaagcaattggatttggaaacgccacaacttctgccattatcacgaatggaaaaacaacaactactatcctttctctgtcacccaatcccggacaccttatcgggcaagtgacaagtgcatcatctggtcttccgcttcaaggggctaccgtacaactttttgatgaaaatcgaacgtttatcctgtcagtcgtaaccgatagccaaggtaacttcacagtcccaactctttctccaggcaagtacgttgcggttgcaagctcctttggattcggaagcgaattgcgcggttttacaattattgcaaatcaagatacaatcattgcatttgaccttgcaccaaatccaggtataatccgaggccaagtcgttacttcagaagccgggcagccaattccaaacacaagcgttgttatacgcgcactaacgccatctggtcctattcttgcaacaaccgttactgattcaaacggattttatgaagtaacaggcatcgtctctggcacttacactgttgtctttagcggagcacctctattcggatcagacatatcatctgtacagttagacgctggagaaattgaaattgttaatgcatctctttcttcttttatttcaactgtacaggggcgtgtagttaacgaagaaggaaacggccttgcaaacaccttggttcaacttttcaacacccaaagtggtctaatccgaagagtgcaaacagataatgatgggaattactttatcagagggtttactgccggaagctatacaattacagccaatcagccaaatttccaagcagccctcactcgttttgaagcagctcctaacgaagtagccacaatcaattttactcttttagctgaccctggaattatttcaggaaccatacgagatgtcgtaacgaaccagccagttccaggtgctgtcgttaacctgttccccaatcaaagtttaagccctattgcctttgccgttacagatcagctaggaaattatcaattcccaggactacagctaggaagctatgttgtcgtaggttcagaatttaactatgcaagtgcttcgactggagctaacgttacttcaaatcaagtcactatagccaacttgttcttacaaccaaactttgcttctatttcaggaactgtttcaactctagaaggcttaccaattaataatgctaccgttcgtatccttaatcaaaatcaagtgattatcggttatggaatcacaaatgaaaatggcttttatgccattgggaacatccctgttggcacgtttacagtgattgcgtcagcaccagcattccaatctgtattatcagaccttacgctggctcaaggggaccaacgaaaaaacgtcgactttgtcctccagccaaatccaggcatattgactggtacggtcaccacccaaaacaatgaaccaattgctggcgcttttgtaaatgtaagattactaggcgtaacaggtattattattgcatcaaccgtcactgattcaaacggacgatatgtaattactgatttacctcccggctcttatactatctctgctactgcgtcaggtttcgaaactaaggcagtaggtgctatcattgaaacaaacgctacagaaatcgcagacattatgcttacaggagtttttggttcaattaacggtgttgtcttaaacaatttagcacagccaatcgttggttctagcatttccctttccctgttcgatgccaataatcttctcattttcaccacaacaggatattcagacggcacgttttcattccctaatcttgaacctggcaactattttattacggcttctgcgtcaggatttattacggaagttattggagcaagagtcacagcaaatgaagccacatttgctagaattctgttacaatcaagtccagctacggtgacagggcaagtcgtcactttagcaggcggtcaggcaatacagggagccatcgtctctgccacaacgcttgaaggtcaggttttagctgtaacggctacagatgtaagtggaagctttacgataatgaatttaccaccaggaccgctcatcgtcacggctactgcagtcaactttggagcagattcaaaaacagttcttttacaaacaaacggcataacttctactactctatttttaagcatggctcctggtttcttaacaggtaccgtaaaaagtgaagctaaaaatcagattcccaacacagttgtgcagctatttgatttcactaacggccttgtggcaacagcagttacaaatgctatcggtcaatacacaatccaaggactaaaccctggaaattaccgagtggtctttactgcagaaggctttgaacgattgtctgctggagcaacaattaattctggagaaacaacttcgttaaatgtaaagctaagctccttatttgcaacaatcaagggcagtgtcttaaatgctcaaacaaaatcacctattcaaggggcagctgtcgccatccgctatcaaagttcttctggcccgatttttgcaactgtttttacagacacctcaggacaatttatcatcagcagtattccagacggggccttttcaattatcgccactgcggcagggtttggctcacaaggtttaacggccttcgcagtcggtgggcagacgttcacatttaatctcttgcttctgccacaagtggggaccattcgaggaaaggttacagatagctcgtcgggtgcaccgttagccaatacgcgcattcgtgtcattaatgcttcaggagtgatcgtgacaacaacacaaaccgatgttaacggtaactacctcctttctaatctggctgctggcacttatcaaatcgtaacatccaatgtagattatcaagcagcagcacaaactgtgacacttaccacaaatgaagtaaaagaagtgaatttcacacttaatggaaacccagccacattaataggcagatttgttgacaaagaaactaaattgcctattattggtgcgctgatagaagtctttgacgccgttgacgtgtcagtaggctttggcttaaccgatgaaaacgggcaatatgttattgaaggactaccacaaggagcgttctctgtgcgggcgtccgcttctggctatatgtctgaaacggtacaaatacagttaagccctaatgaagtgcttgaactcaattttacattaacaacaacagctgcttttacaggtgccattattggtcaggtcgtcgacaactcaacaagtttgccaattgccaatgctcacgtgaatcttttagataacgaaggacagcttatagcttctactactaccaatgaagcaggtcaatatttctttgcatcactagaagcaaacacgtataccgtagtagtagatgcagatggttatcaaactcagcaacaatccgtcacacttacccctctgttccaacaaggcgaagcaatcgtagcaaattttcgccttgatcgaattgaattgggtgcaacgattacaggaacagtcgttaatgctgataccaaacagcctctctttggtgcaacgattcatgtcatcaacatcaaaaaccaaatagttggccgtgcaactacggatcgactaggccgctttacaattaacgatatactgactggcacatataccatcctcgtaaacgctacaggctttatacctgcagatccacagcggataaaagtacactctggagaggttttagacttgcaaacctttgagctaaagcaaataccttcttcgacaggggctattactggtcgagtcgtcgataactcgaccagtgttccaattgccaacgttcgcattaatcttttagatatagataatcaaggacagcttgcagcctctactactaccaatgaagcaggagaatattcttttgtgtcgctaaaagctggcacgtataccgtagtagtagatgcagatggttatcaagccataccaccatcagtcacacttacgattagacaaggcgaaacgcaaagagcagatttccgccttaatccaattggatcgcgtgcaacaattacaggaaaagtcattaatgccgacaccaaacaacctatctttggcgcaatgattcacgtaatcaacaccgaaggacaaatagttggtcgtacaactacggatctactaggccgatttacaattaacgatataccgccaggcacatataccatccttgtaaccgctacgggctttatacctgcagatccacagcagataacagtaaaatctggagagattttagacttacaaacctttgatctaaaaccaaaaaacccagctccgccgccatttaacccatgtgatttaattaatcctgttgtgacatgtaatgtttgtaaagtcacctgccgagaactggcacctgtcagacgcagaacaatccaagtgcagcttcaaaatggaacgtatcgaacccttcatctaattcatctcgttaaaactatcaccgtaataattaaaattacgggagaaaacggttcatatataagtgagccttatcaaataagctcctacgaacgcatagctttagaagtacctttaaatgcaaaggtgcactgtgatattaccgtctccgacttttttgcacaactaatctatttacgaaatcagccagcaagtattttcttctcttttgatttaaatcagcaattcctctctgaaagagatgtagtggtgaccattaaaggtaaccaaattcgcccgcgctgcgaagatggggttattggagaatggggagaatataaaggagtagaaaatttcactctgaaagtctctgaaattcaagattggataaaaacgcataccaaaaaagaaattcaaattaaacttaatcaatttaatttcactagcgaaaacaataaaaattaaagcagtttgataaggaagttattcttaacatataaaaaagcactcatatactgagtgcttttttatcattgagaaagaggtccctgattatacatgaatgccttcacttttacatattgagcttctaactcttgaagtgtcagttcgtataggtgccgatttccttttttataaataccaaagttcaatagcgcattaataaaccaatttctcttatgttccgtttcaggctgtgtgtgttgtttcaccatttccaccacctaagtttatctcatattaattttgcaaagcgtttgcttttacacaaatgattttacttctgcacgatgaaaaaacagtgaaatagaaagcatttttatttaaatttctgcagtcggacccgccatttttttacgtctttttacttccgataatattttcccaatataataaataacactaataaaaaccgacataatagcaaaataagtaccgattacaacaaaaggattcggactttcaaagccgctttcttttccattcatctctctttccatacctcggccatcgtgatcaaagttcggacgttcgtgaccagcagatgccgtcgcagaagatttgttctcgctaaatgaatggtgatcaaaatccagcttcccaccgccattttgcggtatatctgaggaacttaaattcagtactttcgttattcttccaagctttccaagaaaacccgtctcatttatttcgtatatgccaacgactaacagtgcaacggttgcaagcttagctgctatgctcaagcttttctttgactttttgaatttcgtcatatttttacatacgtttataacccattgccaatgaagacctatgtgagcggctactaaaattaacactaaaaacgataccgaaatatgcgaaatcttaaaccattgttcattgccaacattaatattcggaaatactactcttgaaataaaaataccgcttaccataataaatgacattgtaatcaacagcatgatatttaaaaagtaaccaaactttgttctgcgcggaagcttgcggtcaaataatttaaccgtaactttctttacccactgccagtttagcagcacgtgggtaaaaaaggcgacggcaatcgccaaccccgcaatttcatgaaacgttaaccctcccaatacttgtttgttaaaaaacaaaacaaacgtaacggccattaaaagatccagtccaaaccggacgtacatcatctttttcactctattcattctcctcagctatgtatttgtcaaaacaacctctttttcatatttcttaatgtaagcagagttggtgaaaattaggtgaaacgactgatttttttaccaaaataaccagtcttgagctctataaaaaccaaagttccatcattttattttttagaaaatagctgttgacaaagaaaaaagaagcacgtatagtaatggttattcatcaagaactttcagtttttaatcgaaaacacagcgattgggagtagtagaagcttattattcggtcaagagagctacgggttggtgtaacgtagtccaataatactttgaactcgcccaggagtggtaattcagaaagaatgcagaagtattctctaagttttaacgtctaaccttcgttatcaggttttaagcagggttctttaagagccaacaagagtggtaccgcggttagctaaagcttatcgtctcttctctcatttgataatgaggtaggagacgataagctttttttattttataaaaaagtggagggaaaagtcatgaagaaggacaaccaaggtttgcagcgaacaatgacttcacgtcatattatgatgatggcgctaggtggagcaattggcgctggtttatttaaaggaagcagctcagctattgatatggcaggaccatcagttatcattgcttatttaattggcggaattattttactattcattatgcaaggtcttgctgaaatggccgttcgaaacagtgacgcacgaacgtttcgtgatttagttcagtcgattttaggaagctaccccgcttattttttagactggatttactggaaaatgtgggtgttaaacattgcagctgaagccgttgtagcagctatttttattcagtactggcttcctgattatccaatttggatgcttgctttaggcgtatccgttattgtcacagttattaacttgctttcggttaaagcatttgctgaaacggaatactggttagccttaattaaaattacggtcattgtgatctttatcatcgctggacttctgttactatttgtatcatttggtcaccataccgcagccggcttttcaaacttgagcgatcacggcggtttcttccctaaaggaccaactgggttaattacggcgatgctagtggtcatctactcttacggtggaactgaaatcatcggagtgacgctagctgaaacaaaaaatcctgaaaaagtagtaccaaaagccgtgcgcagcacattaacgcgtatcattgctttttatctgttcccgttttttatcatcgtgagcttaattccttggaatgaagtgaatggcgtttctcaaagcccttttgtgatggtatttaaaatgattggaattcctggagcagaccatattatgaatgccgtgatcttgttagccgttatttcttcaatgaactcagggctttacggttcctcgcgtattttatatacgcaagcagtagacggtcgagtgccaaagatattttcgaaactttctgttaacaaagttcctgtctatgcaatcttaatgtgtacatcatccctttatgtgggcgtgttgatttccttatttgcaggaagtaaaacatttgattatttgatgggatccttaggatataccgtgttgtttatttggttgattattgcaatcgcacacttaaagtcccgcaaagttcagccagaagcatcgagtagctactctgttaaatggtttccttatacgacgtgggctgccctaattgcactaagcgctattttaattggtgttatctgcacaacctccgttgttattacgactattacactagctatctatttatttattacagctacgtatatctttaaaggccgcttttatcgatcatcagcagtcaagcacgctaaataaaaaaacgtctcctttgagtcatcagaggaggcgtttttttatttaaaatgttaagtaccaataaccaagtgcaaaaccgatatagttaccaataatatagccaagcgttcctactactaagataggaccaaccaaacttccccatcctttagcaatcgccattgcgcttgctgtcgtaggtcctcctaccgttgcattgctcgccagtaaaatatgttctaaatcaattttaaatactcttcctaaaagcagtcccactattaaattactcattcccacaatgagcacaaatagaatcaaaagaggtgccttttcaacaattaatggaatggacgccggcactccaatgacaacaaagaaaatataaatgaagtatgtgccgatttcttggcttccgctaatgtttttaaaataagaaggaaacagataaatgacaagaaacgtaagtgtggaaagcaataagtatttttcgctcaaaatagtatgtaataatgtttgaactaccgaaacatttggaccggttggaatgattgttccaaaccattcggctaatttaaacgatgcaaccactagaaaaaatgatgtaccaattgaagccgccacgtcttttagcgaaatttctttttttgcccaatatttttctgcaagcgtatggcgatcattttctccatattgcccagcctctacttcttgaatatggggcgtcttaaaatgttttctaaaaaacttcatagaaggaacaaacatatacatggcaaacagcaaagccatgaccatattatcagcaaccaccgtcgcggaaaccatttgacttgatggttcaaatttagccgtaacggtagcaaagttaacccctccgcctacataagaagcgccgatagcagctgcaatttttgctagttcaggaatataatcttttaataacaagaagcctgccgtactccctataaccgttcctactgcacagattaagaaaataaaaagcagcttccggctttcttgaaataattctttcatattgacttgaaataacaataatggaatggcaagcggtactagatacgcccaaaccgcatcataaaccggagactctgttggaatgatttttaaatttgataggataagcgctcctgctagcgcaataatagctcctgacagaaaagaagcccacttatacttttgttcgagaaaaatactaacagaagcccaaatcgctagaattccccataatgcccacgtatcatcagcttgaataatagtaaaaatcacaagctactcctttctttctctttttcaagaaatagaattttcagaaaatacactttagattttatcaatatatgccaaattccgtcaatctataaaaaagagtcgagaacaaagtagtctagttaaagtgaaacacgaactatctatcacaaaggatgaatagttcgtgtttttttatgattatggtgaacttaggttttatgtaggtagctacttctagctgttgattggaggacaaggcgcagactcctgcgggaaaaacggtacaggtgagacgccgcaagagcacaagcagcgaggaggctaagcggcctcccgcggaaagcgaagacttgcacggaaatcaacagcagtgtcacaagcagtccagctcatgtatcccgattgttagtctttagattagattcattttgtgatgtcccagcctcactttttatttacgaacaagaactggaatctgctgcttaatctgctgcaaaggagcgcttgttttctctgttaacgaacgcaagattcctccttcaatcatacagttaatcacaactccaagctctcctgcctgcttttcttcaaatccgctctctatcattttttctctaaaaagtttttcccaatcttgaaacgctgcgtagcagacttcgcgcagcggttcattaataagcgctgtttctccagccagcagtccaacaggcataccagcaatgctttcttcttgttcaaactgcttggacaattcttcaataaaatactgaatagcctgcgctgcgtcagaagatttatttagactttctttaatttgaacttggacgtatttattcgtatagtgaacagcgtgaatcgccagttcttctttcccttttggaaaataataataaagagacccttttggcgacccgctctctttaataatttgatttaaccctgttgcatgatagccttgcagctgaaaaagccgcgatgctgtttctaaaatcttatcgcgtgcatttgctttcttcacaaaacgatgcctcccctatataataagtggtttctataacactacttatcatataagcaaatgaaatttttgtcaaaaaaaagtgaatattttaccatttatttttctttttttatttcttatgacctaataattgtttttcttacttcttctgctaacgattgaagaggcgtaataatacggtcgcttacctccgccgccgcttctaccatcgagagctgcgccactgaaacaacactgttatgctcttttactagctcatgtaagacatgttttaccttctgtttatacttttttaggtttccagtcattactagttcaaaagcaccttctatcacaacaggacgaacctttatctttacattttgatgaaatgcaaattcgtctaggcgcttcattgttccttctacggtctccggatttgtaaacacgataagctgcggttcttctatttcacatattcggtgaaaataaggctcatcgattttaataattggaatatcgcttgtaaatgcttctggtaaaagagcaatgtagttcgtacacgtaagtaaaatggcatccgctgaacattcttccatccactttaactgcttctctacttttgcagctgctgactccgctgcaaacttagggtcggctgttacccgatgtacaaggccaggatctacgaaatgcatacagttcgcaaacggcagcgctttttctatataagagatgttcgaatgatgagcgtgcaggcaagcaattttcttcatcgttttcctcccgtatgatggtctttgaaatactgaattaaaaattcctggaactttttcgcaacaggagttaaatatttatccttgttccacgcaaccccaattacccttgaagctgtgtcttctttgagctttatttttttaatgcctcgcaagtctactccctttatttcaggaagcaaggcaacccctaaatgagccgctacaaaaccaatcaccgttaaaaattcttctccttcaaacgtaatatttggaacaatctcggcctcttcaaacagctgatcaaaaattgttcggcttccatatcctttttttaacgcgataaacgattcatgagccaactctgaaatcgaaagcacttgttttgaggcaaaagaatgcgtatcagggacatacgcgtacagctcgtctttccataaatattcccactgaattcctgccctagattccgttacagaagacatacaaaaatcaatttcccccgtttgaagctgatcgagcatgatgttcgtggcgttctcaaaaatttgaaactgaacgttcggatactcttgtaaaaaagcatgaactagttttgggacggacgaagcgcctaatgattttaaaaaagcaaacgaaatactgccgcggtgaggatgaatcaaatctgaaagctcacgtttagcttcttccatttcgtttaatactttagccgttcgttcgtaaaaaagccgtccgtatcgatttaaaatgacttgccttccttttcgttcaaatagcggcacgccaagctctgattctaatttagaaattgagcggctgagcgtaggctgtgcaattgataatttttctgcggcctttgtgaaatgttccgtttgagctacaacattaaaatattcgagctgctgccattccattttttcacatcctttacttattacataatactattaatttcatataaattatacattggacgtcataaaaaattcatgtttaaatgaagaacgtagcacttgctaaaaataaaaatgttatgtgtctgcatagaataagtgttgaaagaaggaattagtttatggatgtttcaatagttttaacgatgctagccgtcggactgatcttaggatttgtcggggcgggcggatcaggttttattatttcaattttaacgctgctgtacggcgtatctgtacatgttgctcttgcaacggctcttaccgcaatgattttttcttccttatctggcgctgtcagtcattaccgtgaaggtaatgtctctttaaaatccggtatctctgttggtatcctcggtgcattaggcgcttggattgggtctaacctttcatcctttatcccagaaggcgagctaaagtggctaacagccggtatgcttttattatctggtgttttactttggctgcgaatgtttttattttcccgtcagcaaaaagaacgtactgttccaacaggagctaaatttgtcgtctactctttactcattggcttaattaccggtgctctgtccggaatgtttggaattggatcaactccatttatccagcttggccttatgatggtgttaggcttgtcgattcgccagtcggccggaacgacaatgctcgttattattccgattgccattggcgggggaatgggctattatcagcagggctttttagatattccgctgttgattcaagttgtcgtcggcacaatggtcggttcctatattggagcaaagtttacaaatcgtgtacctgctcctgtattaaaaacgtcccttgtagcgctgcctattttctctagcttcctacttgtcatataagaaaaaagcttgaactcttgttcaagctttttttatgtccatctgataaacaaactgctttccttggcttccaaaaatatgccggtttgtatcaacaaagccgcttcgtttatacagatgctgtgcagccgtgtttttatagttcacgcctagcaccactttatttatagtcggaaagtgacggttgataaaaaaaggaagaagtttcaatgactttttaccaactccctttccttgataatcaggatgaatggaataagaccttattaaaagcgcgccggagctctcggtatattctttaacggcttcccctgcgtcgagcacgaaaaagccggctagtttgtttactgccaaaatcaaaacgggcgttctatctctttcctgcttgcacttagctatagcttcagttggaagtgccgtataaatgagctgctcttcaggcagcgtatagctatgtatagatgactcgtaggcttcactataaaacgttagcgctacatttactgtattatccattctataccttactcctttttccatagtataacatgcacaaaaaaagccgcataaagcggcttttcctttatctagcgtcggatacaacggtaaagcgttcgtttatatgctctcctcgctcaatttcatcaataactgcaatggcgtaatcagcatagctgacatggctgttcccttctgaatttaaaataacatgatctttccctgttttataagcatccgttcgttttcctgaaggattaaaaaatgctgctgggctaataaacgtccaattaatatcacttgtactttctaagtcttttaaattttgagcttggttgtcagctgtcgccttatactcttttggaaaatcaggcgtatctgctagacgcgtcgttttctcttcatcgacaaacaaactgcctgctcctcctacaacaagaagacgaacgtccggagcttgtttaaatacatggattaatgattgtcccgcttctacatgcagatgttcttttccttcgggagctccaaacgcattcactaccgcatcgaaaccttcaatatcgtttgccgtaatatcaaagatgtctttttccattgtacgaacatccttttcttctactttgctcgcattacgtacgattgccgttacatcatgcccgcgatttaaagcttctttcacgataaaacttcctgcttttcctgtagcacctacgactccaattttcattttataacctccagtaaaattctctatatctaggtaatagcctttttttgctatgctaaaacactgcgaaacggtttaagcaagatagagaacgaataaagaggctgaagcgaaagttttttagttgaagaaagatccgaacgtaggttttatatatgtaggtacttccagcggttgattggagggtaaggcgaagactcctgcgggaaaagcggaacaggtgagaccccacaaggaggctcacctgccgtccgcggaaagcgaagtcttgcacggaaatcaactagggtgtactaaacgatccatactggcctctttatccatttgttcgactttagattaatttagttatgccttaatctctttgacaaaaaataaataagtgcttattcaatttcaataaataacacgtgagccatagaatgaattgatttaatcaattctactttattccctttcttttttgcttttccttttatttcaacaaaatagagcagttcaccttgatgatgatcctggtgaatttcataggatgaaatcataatattttccctttcaatcttatcaaggagctcataaatagcctcttgattcgctgcacgaaacttaattaaaatggaatgagtagaaagtgatgtaaacatcacgttcaatatttctaagccaatcagcaccaatatagttgcactaatgccgactgtatacatacccgccccaatggttaaaccaattcccgacgttgcccatacgcctgcggctgttgtgagccctctaatatgctgcttttggataataatcatacctgctcctaaaaaaccaataccgcttactacttgtgctgcaacccggctcggatcaagggccatatgatcttgatgaagcacatctgaaaagccatatttcgaaattagcataattagcgtgctaccgacagcaactaaaaaatgagtgcgaaagcccgcttcttttgctctaaattctctttctaatccaaccaaagctcctaacagacctgatagagctagacgactaataaaagctgcggtcatttttcctcctcctttcccttcctcttcattttttcataaacgcacctattaactatttctatttttgttataatttactataactaatttttgaagtggaggctaatcaaagtggataaaattatcgattattacagcagatttgatgagtggggaagattagaacgggagcctattgagtttcaagtaaactggcattttatcgaaaaacaccttcctcccagcggacatatcttagataacggtgctggacctggaagatatgccttaaaactagcagaaaacggctacgaattaactctaactgatttgacgcctcatttagttcaaacagctaaggaaaaggctttagaacggcaagtatacaatgcatttcgtgattttcacgtggcagatgctcggaatcttcaatgttgtctggatgaacaatttcatgcggcactaatgcttggaccaatgtatcatttgcagaagaaacaagatcgcattcaagctgtccgagagctgtatcgagtcacaaagccaggcggaactgtctttatttcgtttatgccgcgcgtccagcacgtcatttcttctttaacatccccggagcgtttaaaaccaaacaacacggcaaaagcgcttcatgatttttatgaatcaggctgctttgatcatgccgaagaaggccggtttactcacgcttattatgctaatattgaggatattattccttttttaaagaagcatggatttcaatgcattgagctgattgcctctaacgttgcttcgtccgttaattctgaggaatggacttactggaaagaaaagtatcctgaagaaatggacagcatcgttcaactgcttatccaacaagcatcaagttcttatcaccttggactttcttctcatttactctatatcggacggaagcactaataatcatctctacctatcataggatagatagaggtgattattaatgaaccgtttattcaaatggagtgcgagcactttgctatgtttgatgtactgctttttgattccccttccttcttatgcaagcggtgactcttactcttcctatgcagaactgcagcagtacgagattctccatcaagactatgatattcgctacgaacagcgctttagctacctatccattatggccattcacggcggaggaattgaaccgggcacatcagaagtcgccacagaactcgccgatcgcttttccgcttcttattatttattcgaaggcatcaagtccactaacaacggagttctgcacataacctcagaaaattttgacgaaccgattgctagaggaatggctcagcaaagtatgtccgtcatgacgattcacggctatagtggtagtcagcctatcgtatatgtaggcggaaaaaatcagctttataaagagctggtaaagcaatcgctgcgcaaacacggctttacagtccgtgacgccccttctgatatagccggaacaagcgagcaaaatattgtgaacgataatctgctaaaagccggggtacagcttgaactcacagccgaactaagaaaatcatttttcgtaaaccacgactggtcgagaaacaaccgcatgaatgtaacgccgcttttccatacatttatgacttccttacaagaagcatcttcttcctatcaaactttcctttactttcaagttcactaacttatcaactcttgcctgttccttgatttccagacaaaaaaaccagcgcagtctgtgtagtcaaacgcgctgatttttatctatttctctcgctaaaatagaccgtttaaagcctttttgctcaaaaaactctttgatttcacttggactttgataagaaagtctaatcacgtagtagttaatatattcaatccaagcaaacgcgtaaaggccaagaaaaaataccagcccttttaatccgtagtttatacagtgatagacgaatacacctagacctatcccaagaagaattttattcattttttttaaaagcagaaacaactgaatgtagctggagggcaaatgagaatcttcttttcgtctcacttgcctccatttcataaaccagtacaagcttccttgaaacaagataaactcaagtataataaaagcatacacacctgaaaacgttgttaaataaaaagctagatgagaaaacccatttaagtaccctacccacagtgcagcaaacagtaaagctgacgtaagctctcctgtccataagccaaataatttgcgctttactttcatcgaaattcccccagcatatctctcaatcttactgttcaaaccaagctttaaacagcaggtttacacctgtttttatttcttcatcagacaatcccgcaaatccaagcaatacatagggcgtcttgttttcatcggcactatgataataaatagacgttggataaatcgttactttttgctcggcagctgcttcaattagtttctgttcactcattccgttttttaccttaagaaggatatgcaagccagaatgttctccaacaatatctatacttcctcccataatagtagtcaaacaatctagcagcagcgattgttttttgcggtatgctgttctcattttattcaagtgacgttcccagtgtccttctttcataaacagaaaaagcgtatgctgatgaagtcttgaaacaggctgtttaaaaagtccacagtgcttcacatatcttgtaagaagccggtgtggcagcacggcataacttattcgaagagaaggcatcaatgattttgaaaacgtccccgtataaataacacgatcgtcttgatctaatccttgaagtgccggaatcggttttcctttatagcgaaattctccgtcatagtcatcttctataatatagccgttcgcttccttcgcccactctagtagttcaagccttcttgctatcggcatgaccataccaataggaaattgatgagatggcgtaatgtacaccgcatccgcttcgctttctttcagttccttgactttcaagccagaactatcaagagaaacagggacgatcgacatgccttgttcttgaaaaacgtgcctcgttcggtgaaagcctgggttttcgaacccaattatcttttcttttcccagaatgacagaaagcagccacatcaggtactgtgtacctgcacctatcacaatttgctccgctgtgcagcgcactccccttgagtggtaaaggtacgctgcaatttcttggcgaagaagcagttcgccctgcggatgtccgctataaaaaagatggctttcatcatgataaatagcttgaaccgttagctttttccacgtattatacggaaatttttctacgtctatctttccatggctaaaatcaagggcagttgatttttgatcttcttgttgcagagatacagagataggaggcagttcttgaagcacgacttcattttttatctcttttacaaacgctcctttcctggctagtatctcaatatagccttctgcttctaactgtatataagctgcttcaaccgtattttggctaatgcttaaatgaagagctaactttcgtttagaaggcagtttttcatgaggcggaatggtacctttttgaatttgtttttttatgtaggtgtaaagctgcatgtataagggatctgcttttcttttatcaagcaaaggcatcaactctaacatagtgttctttcctttctaactgatactattaaattcgctgtttctgacacttactcttagttcagtttcttcatatactgaactatatcttataaatcaaggagctgacgcaatgactatcacttataaaaccaacgtcttaatccgtgcggaacaagctgctgaagtatttgcacattccggtattaaacggcctgcacaagatcttgatcggattcaaagaatgcttgatcacgcttctcttactgtcaccgcttggagcgacagcgagctcattggcatagccagagcgttaacagattttagctactgctgctatttatcggatttagctgtcgtaaaagactatcaaaagcaaggaatcggcacacagctcatcaagcacgttcaatcagaaatcggtgaagaaaccgcgcttattttactttccgctccttctgctatgaactactatccaaaagtcggatttcatcaaattgataatgggtttaaaattgatagaattcggtagacgcgaagaaaggagcttctcctttctttttatccaaatgcctgagctgctatagcaaaaagattgccctgcctagcaggtaggggattgacaccatacgccataacaggaggctcatcttgaagctgaaatccgtgattttccacaagtttttttaacgtttcctcaggagaagacaggtcaattctcagcttttctttgtaattcttcgctagttcatcaattatcagcattgctgcttcagcgtttggagcaactaccggcccaatcacgatattgctcggggtacgaaccgctaaaccataacccgtcattttattttgttcgttttgtaggacaactgctttttcagcttgctgaatcctacttttcaaaaataactttctattatctccaaatgcttcttcatcaagatttacaacctctttgaagtcccttctcgctaaggatcgtgtataaaaatctgaagctttaaatgctctgggtatgtattcactgcttatatatttacttacatagtccacagttttaaaccctgcttttttatataagtgctcaccttcttttgtcgcaattaagtaggcattcacttcagggcaaagagtttgcaaacagtgcttcatgagctgccaggctaacccttgttttcggtaatctcttctcacaattaccattcctataaaagctgactgatttttatacaaaactactgctaagcttgatacaatgttacctttctcatttctatgcccaaatacgtctccagatgaaaaaatcgtatgtaaatctgcttcgctataatcccatttttccaacttagatagcactagcaaatcctttatgtctttttcactaaatctttctatcatttctgcctatttcctcccaacttttcgatgcactgtacggcgttaaaaagcttaaaactaatatacttatccactttcaatcaccacttaacggttaacgaattctctaactaaatagtacagaataaatagaatattttctacattattcatacgtaccaatgatcgcttaaaacaaactaatcatttgcacataaactaataaaaaaagacctctttccaagaaagaggtcttttcttttattttactagcttttgctcagctgcagctgaaccttgacttcgtttatggaatccttttgcgtagtacgcgataataagaccgataaaccataatggtccgatgacaactgcaattcttgtatctggattatatgccatcaaaaccaccactagcgctaggaacgcaagtgacacataagatgttaacggaaataaaggcattttatatttcagttttgcctcttcacctgtttttaacgttttgcgatatttaatttgagaaagcaaaataattccccatgtccaaatcgcaccgaatgttgcaatacttgttacccacgtaaatactttggcaggcacaatgtagtttaacgctactccgactaatagcgcacccgctgatgctaaaacagcttttcccggtacgccgccttttgtaagctgaccgtatccttttggtgcttctccatgttctgctaagttaaacagcatacggcctgtactaaaaataccgctgttacaagaagaaagagctgctgttagtacaacaaagttaatgataccagccgccgctggaatgccgattttttcaaatgttaatacaaacgggcttccctgtgaaccgatttcttgccacggataaatcgacataatgacaaataacgctccgacgtagaaaataagaatacgccaaaagacagaatcaatcgctcttgctagagatttttccggatttttcacttctcccgcggtaacgccgatcatttcaattcctaaatacgcaaacataaccatttgcagcgacagcaaaatacctttgaatccgttcgggaacagtccgccgttgtcccacaagtttttgataccagtcgcaacgccgccgttgccgattccaaacacaatcattaataatccaacggcaatcattaatacaatcgctaaaattttaataagcgcaaaccaaaattccagttcaccatatgccttaacagctaagaagttaaccgttgtcatgatgacaagcgccgataacgcccaaatccagtttggtacatccggataccaataccccatataaataccaacggctgtaatttcagccatacatgttacaacccataaaaaccagtagttccaacctgttaaataaccagcaagcggccctaagtagtcgcgtgcgtacttgctgaatgaacctgcaacaggtttttgaatcgccatttctccaagtgctctcataataaaaaacataatcattccgctaaatccgtacgccaataatattcctggccctgctaatttaatagcagatgcagatccaagaaacagtcctacccctatggctgctcctaaggacatcagcgtcacatgtctttcttctaacccgcgtttcaattctttcccctgagttttcccctgcataaacgtctcccctttttccaatctgtcaaaacgagatgaacacagccttttgttagcgctttcatataagtttgtgctaaaagacagctaggctgtatatttgtattctatcacctttctctcacttttcttttatcgaaaaacaaaaaaattatcttatcattttgtttaaacgcacaattagacataggcactgcttttttaatatgtatttagtattgcacctaagtaatagtattttaaaaaaatagaaaaacgccgactcaactccgtcagcgcatcgttcattttatgcttttttataaaaactagcatttatctcgcgggttcaaaagttttacagccaggttcttccgtttcagaaacatggtgactactttcaggactcacaacgtaaatggactctgcactgcatttatttccggatttccaatacatgcactcattcacttcacataatacaccttgggccactgttatccctcctttgcttgtcttatctatttactacccgaaatataacgattctaacattttcacgtaaaaaaaccgcttgtttctcaagcggatctttttattgcgtgtgttcaacatactgttttttagctaaatataactcacggctcagcgtgatccgccgttctctcaagtgccttaatttagcctgaaattgttcgttagttggctcttcttgaattaagcgatacgtaaaagaaatatcttcatttaactgtttaaaatcttcccatatctcttgaactagggcggattgtttttcttcaaatgaacgattttgctgcgtttttagcacggctaaaatttcttgctgccacgtttcgtcgtttatttcttttgctaataagtatagatctaaataatcgtcaatgcataaagccgtttgtgtattattcaatgtcatcaccttttctatacgaaatgtttcttcctaagaagaggatttcatcatagaaaaagattcctcttcttatctgtcagagctaggctatgctggaattagcaccattcaataattgtggttgctgaggcttcaaagggccagtccctccacctctctagataagaatatttcgtttttaaattatttctgaccattctaatatgttttataggttacgtcaatagattttcaataaaaagaaaaaagaagtaaaatatggtatgctttcataaaggatggtgagcacatgaaacgatatatgttatctgcttttttgggaagcttgctgctgcttctcagcattgccttttcatctactttccatattgcaattgtcaaaacaactggaagcatcggaggggttattttagcagcggcggctttaattatgaacgcgcttgaagatcccccctcctcagacaatacaggtggaggagccgttgaagtactagataaaggcgctgtttgggctacttatttacttttactttcattaccgaacctcatcgcatgtataatatcttatgttttatggactcgctgacattcactaacgttacggacgtttcaccacttggaagctcattgatatttgtttatctacaaatccaagttcacggtacacatgctgtgcaaaattcccagcatgaacgctgagtctgatttcacggtatcctttgatagacaattcatcaattgctttttgcattaacggcttggccaaaccttgcccgcggtattcgggtacaacatataattcgtagataaagccaatttcttcttttgaaaagaactcggtagatgggccgataagaacccagcctgcgagtttattttcttgtcttgaaactaaataataacagcctttttcaaaggcactaccaattagttcatttacgcgttcagctgacggatgaaactgcttcattgttccttcaaacagcgcatcagcagatttcttccgaatttcctgtaattcttcttcagtagcttttgcaatcattatagatctctcctttcgtgttcgttttccacatgcgaggataaattcctgcaaaaaaagtcttcgcctaagcgaagacttttatttaaattcaaaatgttcttgatgattgcctcgttcgtccgtccagttaatcataatgtctaaacctgccgcttttccaggaacagcaaaattcgcatagcgaaagcgctgaccgcttttgcttaagttagacctttcaataggagaaaacaagctgtatttcgccttattttttccttcgtgccgaaaagcttggacctgcacgcgctctacgtcttttccaatgttttcaacggttaatccatatgtatgatagacattatttttccactttagctgattatctcccgtcatgctcgcttttgtcagttcaaccgaccattgttcagatgatttcttcatcggaagcttctcaatcgaaagagcgttgacatgaatggctgcaaaagcaagccaaacaaaacaaaaagtgctgactgtataaaatagtcttttcatagattttgatctccttagaaattttagtagtagcatttcctgttcacttaaaaattatgataaacgctttaacaaaaaaagcctctccatttaggagaagcttcttattaatgcataagcaaatctttttgtgtgtctaatgagtgttttgtatataaatctctttcaatcgcatatttaggacgctgtttcacttcgttaaaaatcttgccaatgtattctccgacaagacccattcccatcagctgcaggccgcctacaagccaaattgataaaataagagacgtccagccaatttgcgtatgatctaaatatttttgaatcagcgcgtaaataccaaacgcaatactaaagagaaaagaagctcctccaagcagcgttaataggcgtattggcgctacgctaaaagatgtaattccatcaaatgcaaaagcaagcattttctttaacggatattttgattcgcccgctgtccgttctttgcggtcatatgtgacttccgtggagcgaaatcctactaatggtacaaggcctcgcaaaaagacgttgccttctttatatttcataagttcaccaagagcacgtttgctcatgagacgaaaatcggcgtgattttgaacgagctgaattcctagcttattcataacacggtaaaaccctactgccgtggttcgtttaaaaaatgtatcggtttctctgctgtctcgaacaccatatacgacttcatacccgagccaatatttctctataaaagtacgaataacactgatatcatcttgcaaatctgcgtcaatggaaatgacgcagtcggattgcttatgggctgcttctagtcctgcgagcaaagcattttgatgtcctacattccgcgctagctttaacccttttacaaacaaattgctgcagctttctttttcaataagcgaccacgtgctgtctttgcttccatcgtctacaaataaaatggtactttcacttgatacaagacgttcatttatcagttcttttactacagtagttaattgaaaagatgtttctgtgaatacttcttcttcgttgtaacatggaacaacaatcgttaaaataggtctgttcatgctattgcccccttactttgcttcatatacatacactttccaagcggactgtttatcgttaaacgcttttaaaaagtgcaaaccgtccctttcagcattttcgattggcacagctgaaaagatatagcgaccgcccatttttttaaattggctgatattaagctgcaaatgacggatttttttcgttgagtcttttcggtaatcatattttttccctagctcgctaacaaacacatagcagcggttgccccaatgatcatagtaactttctaactttttatttttatcaagctctttggcaatgattttgcgaaactcatgtttatacgttaacggatagaagttgttatacgtatctagcgtataaaagccgttatactgagcaattgatggatgaatcccaatgcttgctacccgataagatgatttagatttccctatatatctgctgatttcatcgaattggtggacagcataaaattctttgactgacggctcgtgattgtagcgataataaagctcagggttcgctataaataacacaagcagctgtaaaaccaaacacacccacacaaactttttccacgcctggccccgtttccataagacatagctgccaactgcaaacatcaaataaataatgagagggcgtaaaaaatgaaatctagcaaagttaaacgtattaaaaagctgatatttttcttttagcggctcccatcctttataaaaccaaaatgcataccacatcgacagtaggagattaaaaataaataactgcaaaaacgttttttcaagcttttctttctgattgcgagcaacaatccatagtacaataaaagaaagcggcaaaatgacaaaggtatgaagtgtcattacatgtgtatgcccaagcgtatagttcttaaaagcaaggcgaacggaatgtccgaaacttagagtagagcttaaaaattcatttcgactcgtcggggcctccggaaataaaagagaatcaacaaggcggtattcaatgagtagaaagacagcggtcatcgctgcaatactgcttaaaaaaggaatattccacactcgttttttaactgcatctcttagccacagcattcccatcgccgttaaaaagaagaaaaaccctagcacaaaacttgcgtaaaacggaagcaataaaagagtaagccattccttccacgttccttcgcggtttcgaatggttaaaaacgcccacagcgccagcggctgtcctaatgtactcagcatgcctgaaggccaaaaaggagtaagtgcaaaagcaagtgatacaagcactcgaatcgcataagcatcctcgcttttaataaaatgcttttttaataataagtacattccaattaaagcaaatacgcgcgtgatcgtttggctgagactgtacgcaagcatagtcgggaataaaccatacagccactgaataccgctaaattctgttccaaatgtattcctcggcaatccgttaataatttgaggtaatacggcatgactggagccaaacagctctccgcttcgatgcagaactttataccacgtaatatttgagtctaaattatcgtgcacgcgtatatgtgaattttccccgagcaaaaacataggagatacatacgcaagcagcaaaaggaaagcgataataagcaatgttttttctttattcatagctgtttctttcttcatctgttaacacctatttccatttcgtaattgctagaagctaatcgtgtacgacgactgcttctttttttgtattaaatacaaagtatttttgacccgtataatttaaaagcgtatacagacctgttccaattaatataccgacatcttttttgaacggacgcacagcagcaggaagttgatgcaataaccagctggagaactgcagtccaatatagtaagacaagccgtagcaaacgccgataagcaaaataaaacgcagtatgcttgtagataaatgaactccgcttttaaacgtaaatattcgatttaacacgtagctgacgactgctcctgttgcgtttccgataaacgttgctgcccagtaatgatgaaaaatatgaagcagcacatacataatggaaagacctactgctgtattgaccagtcccactactaaaaaacgtacaaaagatcctttcatacaaactccttttgatttttgatactttcatgaaaattacatattatgactttaaatacagtttcagtgtagcaactccacttaaaaatctaatgaaaataacattaaaaacagatgaaaaaaagctaaaagaatcaataaaaattaggactcttttagctatttagtagagccttcaatgattaatttttggtcgctttgattgtcaaacgcatccactgccgctacttctatttgatacgcagtatgaggctgtaaacctgataacggaagacttagaacatccggaacgggatcgctgtagtattgagaaaatgcattatatgttttgaccacttctccagtttctttatttttgacggtaatgcgataagaatgaaccatcagattatccaccgcttgcgtaaactggatatacagctgattcgatgaagctttttcttgtataacagaaatagtagagcttggcagaaaaatcggttttactaaatctcgttcattcgtgtagtgaaacttttttgcatctgcaggtatgttaatttcccacgcttctcctgtccacttatttgcgtgaaaatcccgccttttaacgactacttttcgattataaacctctacaagaagaccttgactcacatctcggtagccaggaggaagttcaccttgtaaatatccagcaccaggccaaatataccgaacagaagacgttgcaagagatgtaaaatctctttgaaaaatagtacgaggatcgtccaacggatggtgggtatgaccagaaaatgtaatgacttgcggataaggttttaacgtattgtaaagaagctgttcattcacttctatcccccatctgtttttcccgtacagtgtattgttaataggctgatgaataaagacaaaaatcggttttttaggatcgtctcgctttgctatcttcaactgttcagcaagccagttaatttgtttgactgaataatcaccggccgtcagacggctttctgttccaagcatgataaaatgatatccttttatcacttgatgaaaataaagagctttcattttagttttagataaaaaacgctgctgcgcttgctgattggttacgctgtccctgtattcatgattaccaatcgtaaaaagagatacggcctgcggctgtttattttgattataaatagaaaaaaagcggtcgtattcttttaacgcgccggtatcagccaaatctcctactactacaaatgcatcttgtttcggtgcctgttcatttaactgcgttaatgcatgttgaaaagtacgcaaatcaagcgttcctgtttccttaatatgaacatcactgatcacaggaaaaactagctttggttcgatgtatccgcttcgtccgctcttctcttcggctcgtacgtttaaggtaataccgcatataagaacacttattaatactaaagcgagccagtcttttttcagcgtttccataaaaccgccgagcatgatgcttcctcctttcttcactgctgcgtctcagtcattttctctacgtgtatgagcttttattttatgtaatttcaaaatatctaatcgtatagtttcaatatttcttttcgtgtttgcacacactatgttcacaatcaattcattacacttttcctagtcatagtggtatgattttcgtatattacagactaattgttgaaaatgtaggagtgaatattttgaaaacggtcgctgttattggaggaggaattacgggcttaaccactctgtactatttgcagaaactaaaacgagaacgtaatctcccgcttaaattattattactagagaaacatgcccatttaggagggaaaatcaatacccgtgaagctggggaatttattatggaaacaggggcggattctattgtagctcgaaaagaaaacgttatgcccctgctagaagagctgtacttaacaaacgatttagtctataacaaaacgggcaaatcgtttatttactctgctaatgagctgcttccaattcctgaagataccatgttcggtattccaacaagcgtggaatctctttttaagagcgagctgatttcttcaaaagctaaaattacagctttaaaagacttaattactaaaaatacaacgtttacgaaagacagctcaatcggactctttttaaaacattttttaggagaagagctagtagaaaagcaaattgcacctattttatcgggcgtctactctggcgatttagacaaacttacgatttcttcgactctcccgtatctgctcgactataaaaacacgtacggcagcatcatcaagggaatgggagccaatgaaaaaaaatttaaaacggcaggaaataaaaaattcatttcgtttaaacaaggtttatcaacgattattcaccgcttagaagaagagctttctgatgtaacgattttaaaagatacgccaaccaccagcataaaacggaacggtgaacgttaccaaatcagtacgccggggcaagcccattcagcggattacgtggtgttagctacaccgcacacggctgctcagcaactgttgaacgatcccgaattaaacgaagactttgagcagttaaaagattcttctctcattagcatgtacatcggctatgacgttccagacgaataccttcccgctgaaggcaccgggtttattgcctctcaatcaagccacttaatcgccaatgcctgcacgtggacgagcaaaaaatgggctcacacctctaagcgagggaatttgttagttcgcttattttataaaagcacgagtcaccactttgacaccctgcggacgatgtcaaaagcagagctgctagcagtggcacaaaaggacattgaaaacagcttaggaatcaaagagcagcccattgaaagcgacgtaaccaattgggataaattgatgcctacctatcaccttaaacacggtgaacttgtacgcagcttgactcaaaaattgcatgacaagcaccccgctattacattagccggctgttcttactatggagtaggcattgcagcgtgtataacaaacggcaaacaaacggctgaagctatctctcaacagttgacttaaaaaaggtttgaaaacaataaaaggcctgaaaataaatatattattttcaggccttttattaccttttcgttagcatataaagctactttccttactattaacaactcttttatcgcttttctttttgcaaagcagcagtagcaaacaatacaagatagcgctcgtctgaagttaatctaagccaatgtttcactttatatctcacaggtttccgctcccttctttcaaggttttatatgaaaagactttatataaagattcaataacgataagaaatgatgcttgatatgtattttattcccacgcccgcttgtttacaaacttttttaaacgtaagactcttcgtttatttccctgaaaataacaccgttttcgccattatcatcttactatttgagaaaaaagtgtacatttctttcctattttgacgaacattgcgataaataaaagctgccaattgcggcagcttttatgttaaaggactaatctaattatattgcctgatggatcttttgtgatgaaatcttggttttctttagacacagctgctccgatttcacgaagctgatttattgcctgctcccttgcttcttcagctggaaaaacaagtgtaaatgactctaaaccaacgctgctttcaagaggactaggcgctccaattccattccaaacgtttagtccgatgtgatgatgatagcgcccagttgaaataaacaatgcttgattatggtaattgctcacaacctcaaaacctaatccatttcgataaaagttttccgtttgctctaattcagaaacgtgaagatgaatatgtcccattaaggtagctgaaggtaatcctgtccatggtttaccgtttccttcagctaatatcgcttctgcatctaaaggttttgtagccattactacttcactgtcattccattcccatgtacttgacggacgatctcgataaatctctatgccgtttccatctggatctgccaagtacagcgcttcgctcactagatgatcagacgccccttgaagcggataaccgctatttaacaaatgctgcagtatacttcctaaatcagaacgagtcggcaacaatagagcaaaatgatataagcctgttgtacgaggctgttttgctgtaacgttttccggctgttcaatcgataacagcgcggtgcgtccatcagctgttaacagagctttgttctcttttctccctaaaattttaaacccaattatttgctggtaaaaagcaagtgaacgctctaaattttctacttttaaatttactttcccaacaaatatatgaggagcacggtgaaagttcatgattatttctccttttgaatatattattttttaattaacttactttgtgtaactgattatatttttataactttatttcgtcaagttatttattttactatcataacttaaagcttgtatcactgcacaaccagttgaataagcccgcctgctcataacatagtatgaacaggcgggcttatttatcattatgcataaactatcaaaacagttctctgcttttgcgcttgacatttccattaacaaaatactgtattctctctttttgctcatttgttggcttcttatacgtttcacattcaaactgaaaacatgctttttctaaatcgacttcatttcctacaatttctccaatcgcactcaattggtctaaatctcgccaaagttcctcagaagtttcagggtcaaaatgagatgagagataatactgcgcatcatattttttaagttctctttgaatccgctcaaagtcttctttatcatagctccagtcaccgctataaagatctggacatagacaatcacctaaaaacaggactttttcttggggtatgtagacaatggacgagtcctgcgcgtgtacccctccaatatgctgaatacaacaagtaattccacccaggtcaacttccatatgatgatgaaacgttacatccggctcctgtaaaattaacgtgtctcgacacggcatttctttcttgatcatatcccggcaaaactcgatttcttccccctcctgaacgcgtttatccaaggcatcatcgtcccagcgcagtgtctttaaataagccagctttttcttcgttagatgatggctgattgtatacttgttcatggcatgaatgccaaatgtatgatcccagtgccaatgcgtaatagctactcctttgagtggaggcacgcccattttttcaacttcttctaaaaataatgatgcatgcgcaggagaattcccggcatctacgatgaaactatacttctccccgcatataagcccgagcaccggccgatccgtttcttcagaatgaggaaagtaataaacatggtccgttagttttttcagcatatttacacccgctttatgtagtttaataaaaaccgcttcactaaatggtaaataatgataaataaactgtatcatactcggtgctgcttgcctatccaattagctgatattggacttttcttgaagagctatgacttttttcggctcttctgctttgtactttaagaagatcatcacactaatcatcacaatcatccctcccactagctgagaaacagtggtcatttctccaagcaagaaataagcgagaatgatggcaccaattggctctcctaaaatagccattgaaatcgttgtagcacctacgtaatttaacagccagttaaataaggcatgaccaaaaatattaggaataagcgctaaaagcaaaaagatccaccagtcttttgattcatactgagtgagcgatatatgtgtccaaacattgtagacaaatagaaccaggccaccgattaaaaaaacggcgaagctatagatgattgaaggcattttcctgcataattcttgccccgcaagcatatgaacagaaacagctactgtacctaaaatagaaagtaagtctccgtaaagagccgttttggatagtccgatatctcccgatgcgataatcactgagccgctaacagcaattaaaatgctgataattcctactttgcttgttttttctttaaataaaaaataagctcctatcactacgaagaccggctcaagcgcagttaaaatcatagcgctagcaactgttgtatgtgaaaaagactccatccaaaacagaaagtgaagtcctaaaaatacgcctgatacagttagcattagccattcttttaccgtgctgtttttaaaaagaattttcattttcctccatggtaaaaacggtaaaaataagaggactgtaaacagcagtctatacattcctaaaatagaagcaggtgcgtccgaccatttaattaaaatagaagaaaaagaaacggctaatacaccgattaaaagaaagacaggaggcggtaaaggaagagttgatttattcatgccattactccttttagaatctcttttttcatatttactacgggaatatccactccccctctatgtacgatttctttttcctctatgtaaaagcccattgattcatacaaagctatattacgagaaacgctcattcgcaccttgcatgataaactttccttgccacactctttggcgtacgtttctagccattgaataagctgcttagccattccttttccttgaaaagcaggaatgacagacagacggtaaaaatataagctcgtttcttctagcgtaaaacgcgccatcgctaccggcttattttcgacgtataaaatgacagcctcttttccgtgctttaacgattgcataatagattctatcgtttcatcaagagcactggacggtgggacagaatcgcgatatacggagaaggcttgcagcataagatcgtgaactgtagcagcgtcctctggctgtgctaaacagtacttcataaattttaccctctttctataaaaattaagtatatcgaatcattatacaacaccacctatttttttcctacatcttttattgaattttattagaagaaataacctctttttatgcttttatgccttcttaactttactccattaatctattaattcattagcacacactcttgagaactttttgtcgaaatggttaaaattctgttgggagggaatcatcatgacattttcttggcttataccttacatagccgtgtcacttatcattgtcttaataccaggacaagacatgatttttgtaatgacacaaagtattgcttcaggcatcaaagcaggcatcaaaaccgtattgggatctattacgggaacatttgtacatactcttttagccgcagtggggctatctattatctttcaaaaatcaattatagcctttacgattctaaaggttgtaggcgttctgtacctgctgtttttagcataccaatcgtttcgcgaaaaaagcggtccgttggaattaacagaaaacgttcagcagcaccatcactttagaaaaggattcgttagcaacttaaccaatccaaaagtagctattttcttcatcacgttcttaccgcagtttgttaattcgtctcttggacatgtaagcttacagatgattttgttcggtatcatctttatcgccgaaacgctcatcatcttttcacttattgcgctatttgcttctggccttggaaaaaaagtcaaaaaaagccgcatctttcagcacacattaaaatatgtaaaaggaacggtttttggcgtactgggcctaaaacttttattttctagcaacaattaagtaaaacaaaatgaaatttctttcatccctgctgttatagccttttcatacccgcttcatttgtcatatcaccctatttttccatgtgaggttagttgacaaaagaccaaaattattattttatatatatataaggttcagatttagcaacaagattcgacaaggataatgaagaaaaacagcggggaaatagggagatctatctaaatagagggaaaattctataaattcatgtttttcattattattctactataattcatgaagaggtgaaactatgcaagaagtagttcaaggttttgttagttcaatcaacgaatttctttggtcctacttactgattgcgatgctgattgcatttggtttgttttttacttttaggtcaaagtttttacaaattcggttattaaaagaaatgatccgtgtattaaaagaaggtgcggatagctcttctaaagacggaatttcgccattccaagcgttttgcatcagtatggcagcccgcgttggtacggggaatattacaggtattgcgattgcgatcgctttagggggacctggtgctgtattttggatgtgggtgcttgcggttattggttcagcttcagcatttatcgaaagtacattagcacaaatatacaaagtaaaagacaaagacggcggcttccgaggcggaccggcttactatatggaaaaaggtttaaagaagcgctggatgggcggactgtttgctgtcttaatcactttatcattcggcttaatttttaatgctgtacaatcgaacaccattacccttgcgtttgaaaatgcgttcggaacaaatcgtttagtgttaggaattattatgacagtggctttcgctgccattatttttggcggagttaagcgtattgcaaaaatgtcagaatacattgttgtggtactagctgttgcctatattgcagtagcactcttcattattattatgaacattcaagagatgccttctcttattgcattaatcgttaaaaatgcatttggtttcgatcaaattgccggcggttctcttggagcagctcttatgcaaggaattaaacgcggattattctcaaacgaagctggtatgggtagtgctccaaatgcagccgcagctgcaacaacaagccacccggtaaagcaaggattgattcaagcatttggtgtattgacagatacgcttattatttgtagcagtactgcctttatcattttgctttcaggtacttatacaaataaaaatttaagcggtattgagttaacacaagctgctttaagcactcacattggttcttgggcaacaggtgctcttgcaattatgattttcctatttgcttttagtacattaattggtaactactactacggagaaacaaatattgagttcttgaacacaaataaagcttggctgatgacttatcgtgttgctgtacttgcaatgattgtgttcggttctatttctcaaattcagcttgtatgggatttagcagacctgtttatgggctttatggtagtagtcaatttaatcgccattctattgctctcgaaagtagcctttgcggcactcaaagattatcttggtcaaaagaaagctggaaaagaccctgtcttctaccaagacagcatttctggacttgataatattgaagcgtgggatcattcaaaagataaatctagctcgaaaaaagcgatctaacaaaaaagccgtgaatattcacggctttttttattgtacatatttacttctttttctttcttctagtgaagcagtctaagactaaccaaatacctatagtataaataaatcacgctgtacggaatccagtaggaaaaaaatgtccagacgagattccatccgtttccgtatattactctttccatatgcacatacgttccttctaaaaatgttgtaaacagcgtaataagcagaataaaaaaatgaggctttccgattcgctgaattaaaaaaatcatatagctagccaatacaggatagacgcctaaattaaaaggcagcgcctctaatgcttcattttctaaagaagtgcggagtttccaaaaaccataatagctccctaattcattgataacgattgctaaaatgcaaaaagcagttcctactaaaggcagtaaacgacgatttttaggatgtaaatagagtgtgccaaaaatccaaggtaaaacaaacgccagcgctatattgataagcacaaatatccgacctttttcttcctagtatgccacaccgttcctttttctaatcgtctcgttaccttgaacgcagcaagcgtacaagccccttatctctcctcattaaaacagagtgcttactttatgattactgtggttcgtcccttgcttcttccatttattttaacgaaataaactcagcgtcttttttctcgtaatagttttgaactaaacgccctgataaagcagctaatacctgctgaaataacatccccagcacaaccggtacagcaacgggagccggaaaataagatacggctaacacggctccggcgctaatatttctcatgcctccgcaaaacgtaagcgtcacaacttttgctcgatcccatcttagccatttgccaatcatccagctgaagaaataaccagctgaactcattaaaaagacgatcaggataataaacagcagttttttatcaatatgttttaaataaggtgcaattactcccccatttatcataaccatcacacttaaccctattttcgaaacaggtgccagctttggtcctaatgtctgcttaattgttccttttgtatattgatttaagcacatccctaacaaagatggaaggacaatcataaaacataaatctttgactaactttagcgcttccaaatgcacggtgtctccaaccacccataaaagcgtataaggaacgataagcggcgccaaaagagtatcaattaaaatgatggatagcgcaagaggaatacttcctttgtaaatcgagacccatataaaactagtcacgcctgttggaataatcgctgctagcaaaagacccgtgcttgtaaatacatcatgtggaaaaatcacttggccaacgctccaagcccacgctggcataaaaatatgtaaaacaaacagggccataatgattggaaatggacggtgtatcgtggcatttaactggtgaaagtttgaattcaaacttccggcaaacgtcattaatgcaaaaagccagggaattaagaaggcatactgacttaatgacgaaccgataagaactcctatgagcaagctgaccggcgtaataaacggcatcaatttttctagcattttatttaattgacttaacaaaacttctccctccaacgaacgttttcaataaataataagatacattaacgtttataatattatctatttattatacaacttattttcagactgttgtctgtctcttttattaaaaagagatatattcataattatcacttaaatagatttacgggtatttttatgctattttaatagggaagaagcttttaaaaagcatgaatttagggtacagtacattctacatagacatgcttcaattgacggatataaatgaactgtagcacagttttggtaattaggaggattgtatggattttttaaagtctctgtcatcgttggatgattggaaaaaaatcgtgattgcgattgggatctttttgatctttttgattcttcgcaagctgttcacgacttatttgtttaagtttattattggttttgtcaaaaataaaaaaatcaatttaattacgagcgttttagaagcttttgaaaagccgctgcgctgggtttttgtcattattggtttcaagcttgctcttccctatcttccctttgatgttttaacagccgatacggaaagacatttagttcgttcagcttctgttggccttgcaggatggggcttgtataatttagctgcttctaccaatttattttttgcaacgtttgccaaaaattttgatatccaagtggatcgaatcatcattccttttattgaaaagttcatccgcatcgttgttgttatgctttctatctccatcatcgcagaagaatggggttttaacgtaaacggctttgtagcaggtcttggcttaggtggtcttgcttttgccctagccgcaaaagacaccgttagtaatttattcggcggaattgtgattattaccgaaaagccttttaccattggagattggattaaaacaccgagtgttgaaggtgttgtagaagatattacgtttcgaagcaccaaagttcgaacgttcgctcaagcagtggtaacggttccaaatgctactctttctaatgagcctattattaactgggctaagatgggaaaacgtcaaattgcctttcatttaaacttgaattataatacaccaaaagaaaagttagaaaccgtagtggcaagaattaaaaagatgctgactgagcacgaagaaattcacaatgaaacgattctggttaactttgacggtttttatgaatccagtctaaatatctatctgtatttctttacaaatacaaccgttttcgctgattatttagatgtaaaagaaaatataaacttcgaaattatggacattctcgaagaagaaggcgtagaatttgctttccctacgcgcacactcatcgttgaacaggacggaaagctctctggcaatccaaaagaatttctagaaagtgctcgaagctaaaaaaagctgacttaatagtcagctttttttcctttcttttttagtttgaaatgaacatttgagtccagtaatgaccgtagtttccgcctttagcgtaacctactccgatttcggtaaattgacttgatagtatgtttttacggtgaccttcgctattcatccatgcgttaaccacttcttttggagttgcttgtccagcagcgatattttcacctgctgtactgtatgtaataccaaattttttcatcatgtcgaacggacttccatatgtaggcgatgtatgactgaaatagtttttatcaatcatatcctgcgatttatagcgagcaacgcgagctacttcccaattagattttaaaggtttaagccctactttagcacgttcttgattcactagctgaaccacttgctcttcgtatgaacttcccgctttatctgttggtatggtaattttttgtcccgggtagatcgaattaggatctttaatagcagagttcgcttcaatcagctcggaaacgccaacctgatattttactgctattttccacatcgtatcgcccgattgaacggtatgtacggttgctgcttgcgcagtgttattaagaccaaaagctagagtgacagacaacaatgttactaataaaagttttgatagagttttcatacttttattaaagcaaattgatttcaagattcatagcggtaatattatcccatagttccatcatatgactttgtcatcttcccagcacgctttttccataagaaaggcgcattgctcttttgcaatgcgcctttttgttacgaagataaagcctgtgactgattcatgtctgacacattaaccgcttcatccgtgctttgatgcacctgacgttttttgatcacatcaatatattgaatgtgatggccttccattttcgtaacggtaaagtcatactgatcaaagctaaggctttctccttgcttgacgtcatatttttccgtcaagacccagcctccaattgtatcaacatccgtatcatcaattgttgtgccaagcagctcgttaagctcacttactaataattttccatctacaatataatgatcgggtttgactttctgaattaatggaagttcatccgcatcaaattcatcacgaatttcaccgacaatttcctctaaaatatcctctactgttacaatccctgctgttcctccgtattcatcaattaaaatagccatatggatgcgttcacgctgcatcttaagcaataaatcatgaataggaatcgattcaattacttcaataacaggacggatatactgttttaaatctattttttccttgctgttgttcatgacaatctcggttaaaatctctttcatattgaccattccaataatatggtctttatctccatcgatgaccggatagcgggtaaaccgctcttcttggaccatctcaaggatgtattcgaccgtatcttcctggtcaatcgaaacgacttccgtacgcggcaccataatctccttggcaacgcgatcatcaaagtcaaaaattttacttacatatttaaactccgattgattgatttcaccgcttttatagctttctgataacaagatgcgaagctcttcttcactgtgtgcaagctcattttctgaagcaggctttagaccaaataaccctgttattaaacgagaagaactgtttaatagccaaatgaaaggataggttactttataaaagagtataagcggacgaacaaataataaagtgactttctctgctttttgaattgcaaatgttttcggagcaagctctccgaccacaacgtttataaatgtaacaaccgcaaaagaaatcgcaacagatagtacttttgttaaagctccgcttatccctagttgatcaagtaatggggagaggagatgcgaaagtgtaggctctcctaaccaaccaattcccagcgcagtaatcgtaataccaagctgacacgcagataagtattcatctaaatttgaaataacttgcttcgcagcttttgcattgctgctcccttctgctataagctgatccactttggaactcctcacgcgaataatcgcaaactcggtagcaacgaaaaaagcagttaatgcaatcagtaccgctagtaaaatcaagttaaatatgtccaatcaagttccttagctcgtttaaaaacgagtaaggactcacctcctaaaaaataaaaaatttggataaagaactctatccctgtactgatcacttggaaaagtgcatataaggaggaatcacatgataaatgtataaacatttttatatggagcaaaactgccagtctttcttccttatctcacgtttcactcgttaatgtagcaggtcattctttattcagctgttctagatgtgaagcaatggctcacatcgcttcatttcatgatgttgcttcagcgctgattctctcttccattcatttataaaaaatttagtagtttacaatctttataaagttaaagtctgttaacgtcttaaaagagcgattatgtgataaagagcgatatgcgtgaagcaaatgtaggtttatataatactgtattgtacgctttgacactggtgcatataatgctacttcgccaacgtggtacactgccccatccaatcacctctatttccgtatatctaaaaagaataaggaataattatcctatttctttttaaacttattgactttattttaaatgttaaaaactttgcagtcaaacgttttagttagtctcctgcccttgctatttactggtgcggcgatttttagcaggtaaataaaagcttgctgctacacaaaaaaaccaagaacaaaacagataatggggagtttcatacctatcgcttcagcataataagtgagactccttccgtggataggggcaagattcatttcaaaaatcaaagtcaaaacagctgtcactttgagtgcaataccaacaatgaatagacaaactctcaagcctccactcatatgcgcaaacatcccttctatccattagcgaatggatgatgtactacaccatatgatacatccctacactttatcactaaatgctaaaaaagcgctatgtccatgcatagacgcttataaatttgcgaccacttgtccaatggaatcatagataaccaaatcaaacaaataatcgtaatgggtaggttctttattaatcatcaccatatttggacgattgtaccggctcacaagcagcggaatttgattaatcggtgctacttcaagcgatgaaccaagcacgatgaataaatcagatgacagcgctgctgtaactgcttcatcgaactgatgaatggcatctccaaagagaacaacatttggctttaaaaggcgctcacacgctgtacactgtgggagagctgactgatttaaatacgctaagtcatactcttttttacagctcggacaatgagctctcttaatggacccatgaatttcaaaaacgttcgtgcttcctgcatcttgatgcaagccatcaatattttgcgtaatcacatgcacggttttggcttcttctagttcagcaataaagcgatggcccgtatttgctttatactgatgcagcattttaatatgaaaaatttctttaaacagcggccaaaattcatgaggatattgctcatagaagtcagcagctactatgtccacaaagcttttattttggcgatataagccattttgagagcgaaagtccggtatgcccgactctgtgctcattcctgctcccgtaaaaaaacaaatgtgtttagcatcatcaatgagctgttttaattctttgtactgttttaccattgcatttctctcctatttaacaattagcacaggaatcgttacttgctgtgcaatcttagaactcacgcttccaagcagcatgccttttacaggatttaaacctctgcttcctattactacaaggtcaaatgaattttgattagcaaattgaatcactgttttagccgcgtctccgtgcataaacgtaatctcatactccacgtttccttgctttaaaatttcatctgttgtatgtatccggctttcccgttcctcatcgcggctaagtgattttaatcttgaatcaccctctactgcataaatgacctgaataaaactgttttccgtcagctgagccagctgaacggctttttctgttgctttagctgcatgctctgagccatctgaggcaagtaaaattcgtttaaacatcacgcttcctctcctcttttgtaaaatgttcttctctctttactatatcactcgctgttcaaatgtaatcatttttttgattatttctataatttttaaaattatttgtctacttttatgataaactgaaagaaaacttgtacagaggggatggaacgatgtttggttttgaattaatttgcactttttgcaaaggactcggaaagctagccgttattcctggtatcggttacatgaaaacatgcaaacactgcgaagggacagggatgcaatcaaaaaaagacgaaactccttccatataagaagtttcgcctcagccatactgtgattagattgaaagctctttagataaacggtacatatcagcattgatatggtgaggttcacctaaaatttccataatatcataatctacaatttcatttttacggataccgattgcacgaccgcctttaccttctagcagaagctcgactgcacgaccgccgaaacggcttcctagcacacgatcttgagcagttggggaaccaccgcgctgaatgtgtcctaatactgttacacgcgtttcaatacctgctgcttcatgcagctgcttcgctacttcattaccattggctacgccttcagctactacgataatgctgtgctttttaccgcgctcttgtccttttctcaaacggtcaaccatttcttggaactcatcttttgcttctggaataaggattgtttccgccccgccagcaagacctgaccaaagagcaatgtctcctgcattacgacccataacttcaataataaacgtacgttcatgagaagttgccgtatcacggattttatcaatagcatcgataaccgtatgaagagccgtatcaaatcctaatgtaaaatctgttcctggaatgtcgttatcaattgttcctgggataccgatacaagggaaaccaagctctgttagttttacagctcccatatatgatccgtctccaccaataactactaagccttcaataccgtgcttcttaaggttttcaataccttttaaacgcccttcttctgttttgaattctggacatcttgcagaataaagcatagttccgccgcgttgaatgatgtcaccaacatctccaacttctagctttttaatatttccttctattaacccttgatatccttgatagataccgtaaacttccataccttcatgaattgctttacgcacaacagcacgaaccgcaggattcatacctggagaatctccgccgcttgttaatacacctattcttttcattactttcacctcatcaaagtcacatacatgactactatattatagttctacattttacccgagttcgaactttttgtgtagtaattcacaacatatttctttgttaaattttaaatgtacatactttttcatatcttttagttatttaccgtcaaatattcaaagtttttctagcaatattgcacatctaaagaacccttttagttacagcttttataagactatattcacctttatatttcatttttttcatatatgtaatgaaattgtaacgtagaacactgtcgaaagatgatatgatgaatttactcaaatcaggaaaaattttcagggggtactagttttatgaaaaaagtaatagcagctcttacgcttgctggcgttattgtttctactagcccgattgtcagccaagcggctctaggcgaccaaacgcttcgccaaggcatgaatcaccaagatgttaaacaactacaacaaacgttgaaaaataaaggttattttaaagggaatacgactacatactttgggactgttacaacttctgctgtaaaatcatttcagcgcaaaaatggactagcagcagatggtattgtcggaaagggaacgtatgctaaactaggcgtttcagcaaagggtaaatcgccttctagctcagcgcgctataaccctaacgcagtgattaacaaaggaaaacagtatatgggcgttcgatatcgctggggcggaacaacgccaagcggctttgactgcagcggttttattggctatgcgttcaaacatggaggcggggttcaacttcctcgaacagtagctcaaatttatcaaaaaggaacgcgcgtctcaagtccaaaagccggagatattgtgttcttccaaacctatacaaaagggccttctcatgcaggaatttatttaggaaataaccagtttcttcactgctcttcatctaaaggtgtgagcatctcttctctaaaagagagctattggagcaaacgctatttaggtgctaaaagaatgtagtttctataaatggggcaagctgtgcgattttgatgcggcttgctctttttctgcatgtaaaagatttggtatagtagaagcagcacattacattgcaaaaccaagcgtgtagatgaataatgtaaaggaagttgaataaatgtacacccttttaattgacatggattctgtcatttgtgatcttatgacagattggcataaccaatataacaaagattattgcgacagcttatcggttgaaaagttaaaatgctgggaatcagaaaagtatgtaaagccggaatgcgggacaaaaatttatgactacctcgatcagccggggctttttttacatttacaacctctgcctcatgctgttgaggttcttaaacgactttatgaaagattttccattttaattgtcacaagcagccgtacctatgcttatacagaaaaagagcagtgggttgaaaaacaccttccgtttatcggaaaatacaatatcgtgtttacacaccaaaaagataaaatatacggagacttgctatttgatgatgcaccgcataatttgaaggcttttcaagctacaggtcgccatgctgttgccatgaactacccgtataacgaagaagtaaatgtccctcgcgtggacgattggcttcagtttgaacagtacgtaaatacttattttaacgaatgttaagctaaaaaacacgtggactttgtcatcagagaacgtatgcagtgcgtctgttagcatagctataagcataaaaaaaccgccttttgggcggtttttgacggatagccccctaaggggggttatccgctttttatttaaaaaagatatcgttttttagtacttatcagctgatgagaaaaagtccataatagcatggataatttcaacggactgaaaagaaaacaatgatatggctgttaatgaaaagaaaccaatcatggccatacgtacaagtaacatagactaatcgcctccctgttttgaactaaatgaacgcacccaaaacaattcgctatctgtctttgtttgtacgacgttttcgccaagcaaaggcagctcattcactgcgtgtaacaatgacaatgaatcttcatctttctcttaaagactaagcgtatagttagtatatcaaatgaaactttttcttcaaggttatactagcggtaaaaaaggaaatagtatgaaacgatgcgttttatctttatttcatacaattcagtaccctaatatttattatattaaactttttaagaaaattgctactattatatcttttttataaaaaagatagtaagacatagctatatacagtaaacctgcgttcaccctcacaatgaaaaaaatccgaacgattcatcgttcggatcctctttcaactgaaatacttttgttccggccttccccattttatcgacacgtactgtaatactcgttgacaatgtctaaaatagttgggtattcttccacccatgtaaaatttgttttttcgttttcttttttcactgtttcttgttctgcaccgatcttttccattgttcaatctctccctttaactgttatataacatttatattaaataaattttgttttataacaactttaaaaagaaaattggacaatgcgtatgaaaaaaagttattgtagggataaaattttcacataatacgtacgagtccttggtccatcaaactcgcaaaaataaattccttgccacgttcctagcagtagctgcccgtcgtgaatgattatatgctgagaggagccgaccgtgctcgctttgagatgcgccgccgtatttccttccatatgaagatctaacttatgttcccaaggatatacttcatcgaagcgtcggatcatatcggtttttacatccggatccgcattttcattaattgttataccagcggttgtatgaggacagtaaacaactacagccccttcttttaatccttctgttcttattactgcttgtacctgactcgtgacgtcgatcatttcgtcacggttattcgtttttaacgtaaatgaatgcagcatgccatcacctcttttctttaccataacatatcttttctattcttccacatttttcgcataactcgtttttacatcgtaaacactaagctcattaacacaacaggcggtgagtttacttatgctcgattcaaaatttcagcccaatgcagactacaccgttcaaacgtttctagatttggtgggtcaaaatacagatgttggttccaaaaaattatggctgtctcccacaaaatatatatgcattatttatctccaaggattagtagacggagaaaaacttgataatcttactcagcatgttgttgagacaaaagcaaaaagtgaaacgcaaacactcgatgacatcgattcgtttatttctgtcattaaagacaaagaagtttatacatacaagcaagcgatctcgtctttttttaaaggtcagcccttgctgtttattagcgagagcaccacggcatactcattgaatatgtctatgaccaaacagcgctctttaagtgaacctacaacagaaaaagtagtgcgtggccctaaaattgctcttatcgaaaacttagatgaaaaccttggtcttttaagacagcgttctaccgaagaagaaatggttattgaagacatttatattggaaatacaaaggaacatcgaacaagtatcgtttttcataataaacactgtcaaactcacatcgtgaatcaagtccgagagaaattattagacattcctttagataacattcaagattcaggaatgattgaagaatttttagaagaagcaccttactcaccgttccctcaagtacaaaatacagaaagaccggatcgtgttctcgctgcggtgaatgaagggcgagtagccattttagtagatggctctccttttgctcttttagtgcctacaactttcgatatgattatgaaatcaccggacgattattacgaaagatggatagctggttcattgctaagattactaaggtacttgtctatttttattaccctattcttttcagctatttatatttcactcgtttcgtttaaccaaggtctgcttccgacggagcttgctattactattgcggccacacgagaaaacgttcctttttctccttttatcgaagcagtggttatggaagtgacgcttgaattattacgcgaagccggtctgcgtctccctactcctgtgggacaaacagttggacttgtaggcggggttgtgattggtcaagcagcggtggaagcccatatcgttagctccgttatgattattgttgtatctgtatcggcaattgcgtcctttaccgttcctcagtacggaattggcctttcgtttcgaattttgcgtttcgtctctatgatgattgcagcaatctttggattatacggagttaccatgttttttcttgttctcgtcattcatctaaccaagctcgaaagttttggcatggcttacttcaaaccgttttttgcgttaaataaaaaagcgtggaaagattcttatattcgtctgccaaacaaaagtctaaaacagtctaaaaataaagccaaataaaactgacaaaaggaggaccatatggaacaatcacagtcacaatcaagcaagcttctttcagacttttatgccatttcaattatctcttcaaccatgctgggcgtcggtttattaacactgccaagcagcattacaaaccagacaaataatgcagacggatggattgtacttattatggacggccttttgtttattggaattgttctttttttagtctggatggttaaatattttacgattagctgtatgtttgacttcacgcaagaagtaaccggcaagctgattggaaatatcttcaacttcgctatagtcgtttatttcacatctgtagcaagttttgaagtaagagctatggcagaaatgatccatttctatttactggaaacgatgcccattgagttaattatcctttcgtttattttgacaggcgtctatttaatcactggcggtattaattctattggaaaagtaatggccctatgttttcctgtaacggtcatcattcttcttatcttatatcttcttagtatcggaatggtcgatttaaaaaacttacagcccgtgttagccgatggattcagcccgcttcttgctgcttttacaaccgtctctgtttcctttttagggattgaaacgattgtatttcttccaaaacatatgaaaaacaaaaatcatttacgaaaagtttctatcatcggattttccattcctttacttttatatattatcacttacgtattagttgtcggcgcgttatccgttccggaggtaaaaacaaccgtttggcctacgattgaatttgttcagacgcatgaagtaaaaggaattttctttgagaggcttgaattatttttacttattgtctggcttcttcagttttttttaacctttgtaatgtatttctttttagctgtttcaggatttaaaaagattttcaaaaaccgatcaactactaatattatctttcttgtgcccgttttatttatgagctctttagcgcccaaaacagcaagcgacgtgtcacatttttcaacggtattaggctgggcatttttagtgacatttttagttatccctctttttttcagcatgttaatgaaaataaaaaaggttgtgttcaaatgacgaaaaaatgtcttcctgtcatgatgaccatttttttattatgcggctgtatgagccatcgaaatattgaacaacttgctcttgttataggagtggcaatggatattacatcgaaaatcgaaccaaaaacaggaaaaaatcaacttgtgctgactcatcaaacgttaaccgaaacggaatccggaaatatgtcttcttccattccatacaaaaacattacaacagctggtcctactattcatgaaatcacgcgaaatatttcgctgaaatctgatcctatatacagccagcatcagcgagcacttttaataggagaaaaagcgagcaagaccatccctctggatgcgcttatcaatcagtttgtccgtgataatgaaatacggcgcagcagccttgcgtttgttacaaagggcgatgctaaaaacgttttaacgattcaaggaatgtctgtaccgcctgtaaacttaatttacgagcttgtttccaataaattcaaaacgaataaaattttaaatcccctaacaatgggagagctatcggccaagttaaaaaccgatcaaagctttttaatacagcggctttctaaaattaaaaatagtgttgaactagacggtgccgcgatcatcaaagataaaaaagcaaaattcatcttaactcagcaccaagtggaggctttaacgtggttaacggggaatattaaaggcggaattatttacggcaaacacgggccataccccttttcctatgaaattggagatgttcagcaagatgtgaaggctcggattgattcaagtcactccgttcattttgatatcaacgttcaaacaagcggcaggctatcagaagattgggatacttcaaaacaggctcttgccgcctctaatgtaaagaacaccgaaaaaaaaatagaaaaaatcattcgaaaagacgcagaaaaaacactccgcttactgcaaaacaactacaaagctgatgtgattgacctgcatgattacgtacgaattcattatcctcatttttggaaaaaacatcagcatgaatgggatgaaatatttagccagtcgaccatcgactatcatgttcatgttcaaattaaagatttcgggacacagggcagggattagctcttatcactcaacgccagcttcagtcagctcttttttctttagttccataatcgtgaacttatcggtatagtttttgctgacgaacagctggcgttcattgtcgttattaaaataaaattttttatcatcttgatattgaaaattcacttttttctttttcatttgtttaataaacgttaagtagtcatctgaatgaatgagataccttttaggcttatccgatatttgcacaacgtcttcacccgaagattttaattttacaatactccatgcaatgggaagaggattaccttcttgaaagatcgttttgtgaaaaatgagcacaaagaaagcagctgtaataattgaaataagaacaagctgttttttcaccgtatatcatcctttcttcacgtcgttactacgttaagtaatacgacaggcgtatgaaaaaacctgttcatccgcaaaggttgtgtaaagaaataatgcaaaatcaacaaaatataacagtttggttaccttttgattaaataacattacttctttacaaatttagctaatcacgtgatagactaaactcaacatattaagtcaggactaaactaaatgaggtgttgcgtatgactacaatgcggcttcaatcatacttaacaacaatgtttccaaatgttcaaatgaaaagacctcttttttataacgcgcccgcaggtatccgctttacgcttaccaatcaaaaaggtgtgtgggaacgagaatatatgaaaaatgtgtacgcacgcgcttacgaaatttttgagacactccatgaaaaaaacgatgagctgttacttgttttcaaagcgaatgctgcacaggatgatttacttttaaaaaagaaaaaagaaacagctattaaaaaattcattcgctctcgcctgaagaaacaagaagttcaatccgtagcattattaaataacgctgagtatattattgcgtgtaaaaccaatgatgtgaaagaaaagcttcttttgcaatcaattgccaaccgcgatcttcatattcatccggctattgaagaagagtgttatattgtgaatttgaataaagaaaccatcttccacctatacgacgagcgcgggctggacattgtatcgaacaatcagtcttctcttcaacttcttcagcaaaagtttcacgactggattctagatattgatgcagcttgctctaaaaaagtacaataaaaaaagcaatcattcagtaaagaaatgattgctttttttattaggcttgatggacaggagacgctttttttaaaaacagccagttgataagaaagaataggaagcttgcgataaccattgttccgaatgtaagtaataacgacccattcgaaaagctttttataaaatgaataactggttcttttgtcactggaatcgtaaacaataaaattaaaacagcacctgtgatcatccctcctgtttgcccgaatttgtaaacgatgctgccgagcaaacacgatgctgctgtaataaaaaagataaatacagcgtccgttaaaaagtgaacagtgacagtggagccatgaaagataaaatcgctcgcataataaagttgaatattcattaaattcaaactattaatcacctttattgaaatgctcatgatgacaacattgataagggacattacaattgcaaataaagcaaaaacacaggtcatcgttaaaagatatgctttacgagtagctcctaactttaagcaaaaggaaaaactttttcgaatgataataaaacttacaatacctgaaaagatatactgcggcatacttgttactaatagaagatgctcattcacctgactgaaaacgaaaatatctactacaacaaaggctaacagaatcgtccaaaagcgaatcattaaatactttagttcaacgtagagcgaataactaatggcggcaaactgtcctttcattacgctacacctccacgatttgctgtaagataaatcataatatcctgtatatgaacagcttctatatgaaatgaactgtcgacaagctcctcagcataaatatcttcattaaagagcactatttttttctctcctccgaatacttgttcatggattacttgctttcctttttcatattcttcaatttgacttttaggtcctttcacacttacacagcgctgctgcaaattttctgccgtatcctgaagaatcagctttcctttttgcataatgagtacttcttcaaataaattacttacctcatcaattagatgcgttgaaataatgaacgtgcgtggatattcttcatattcatccaatagaagctcataaaaacgcgctcgcatcgcagcatcaagtccaatataaggttcatcaaagattgtgatgctcgttcgggaagatagcccaacaataattcctaatgctgattccatacctttagataatgctttcactttcatattacaatctaaatcgaactcttccataagcctctcagcagcttcttcgctccagtaaggataaaaaagtgacgcaatttttaacacgtctttgacttttaatgtttttttgaaatttccgctttcgttaattaagcagatgttttgcaaaacagagcggttttcaaatggagattgattgcccacttttacctctcctgtcgtaactggaatatgcccggctacaatttgcatcaaagtcgttttgcccgctccgtttctacctagcaacccgtatatcttattttttgctagtgtaagtgaaatgtcttttaatacgtgtttagatccatagcatttatttaacagctgcgcttctatattcattttatttcccccttgtctaacagctcttttaactcttttaccgtaatccccaaatgctgtgcttcttttttcaggggaacaataaaacggttataaaattcttcttttctttgtgtaagcaatacttctttggcgcccgcacatacaaacatccctatccctctctttttatacaatattccgtggtcaactagctgattaattcctttagctgctgttgcagggttaatgcgatacattttggcaaattcattcgtagacggtactctttcttcttctggaaaagcatcattcaaaatattctcttcgatggtttctttgatttgttgaaaaattggtcgctgatgatctaatgattgtttcattttgactacctcacttaagtggttcattactcatgtaactaactatataactaactggttattttttcaagtgttatttccaaaaaaagaaaaaaagtccgtcagttagttactgacggactttttcatttgactgtttaaccacttgaccgttctttttactagctcatcctgctgctctttaggggaaatactggctttgttgtcgcctttttgtttcccgtacattccaaactgtgcgtgattagctccttttacttggaccagctccgtattttttgaaagtaaatgcttggtttctttaattttttcaggcgtcgacaaaccatctttctcaccggttaaagacaaaataggataagtggaaattgaaaaattatttttattcatcggatacgatgctaaaagaactaagccttttattgagttttgatgatcatacgcataagaggctgcactcactccgccaagggaatgccctccgataaaccatgcggaaatcttcggatagctcttcacaatatccgtcgctttgttttgactaaaaaaactcatattaaacggagaatctacaacagcaacaagatatccttcatttgcaatttgctgagcataatagccatatgctaacggctctactttagcaccttgataaataatatagccggcttttatctctttgttcgtttgaggcttgaatacgtaataatcgtctttcttcactacttttttctcatctactagcgagtgaagctgctttgaaggttcataatcaaaacctgaccatatgacaaaaaaaaccacggttactgcaacaagaacagcaagactgactcctactatttttaacgtttttttcatgtcactccctctttctgttttttactatgtactctttttatatcttttagacattttacatgtttgttttaaagatatacaagaaaaaagagaggttcgatatgcccaaagcaggacgcagcagaagcgacataaaccattccatatactcgaaacaaagagagaaaataaaaaggctgctgcatgtaataacgggacagcctcattagcagacaaccttcactaatgaatatctcgtttcttaaaccttcctcccctgacttcagcaatagcggctacagcaaaaaaagcagatggatctatctcatcgataatcgcttttagctttgcttcttcaagcctggtaatcacacaaaaaatgacttttttatcatctcccgtatacgccccttccccatttaaatacgtgacgcctctccctaaacgagcaagaattgcttcgccaatttgttcatattgttcgctgataatccaagctgacttagactcatctaaaccttgaatcacaatatcaatcgttttaaaagcaatgaagtaagccattaaagaatacatagcgcgatcccagccaaatacaaaaccggcacttcccaaaataaataaattaaaaaacataatcgtctcacctacggagaaaggcgtacgcttattaaataaaatagctaatatctcggtgccgtctagcgaacctccgtaccgaataacaattcctactcccacaccaagaacaattccgccaaacacagtggctaaaagagggtcacctgttaagaccggtaagtcgtgaaaaatagaggtagcaatggatagaatgataacacctaaaagcgtagatagcgcaaatgtttttccaatttgcttgtagccaataaaaaagaatggaagatttaatacgaagatataaaagccgatttgaacatccgttaagtgggataaaataatagatatacctacaattccaccgtcaataacctcattagggacaagaaaaaattctagcccgacggccattaaaagggctcccactaaaataaacagcatgcgctttacaatcattttagctgatagcgaacgatgaacaaccttttttatttcatgattcgtttgcagcacatatcttcccctccttttgcgatagagacatcaactactaaccaaacccttattttaatattatcacaaaattcaaactatttatctgctcttttacaaaaattccatctaatgaaataaattatgcatatattggataaaattgtagatgataacaagtgaataaatgcccgagtacgttcaaaagtgaatgcatgcccaccacttttcatacgggactaacaggacaaacttagattaaaaggagagtaaaacgttatgaaccgtgtaaagattattgctgcttctttactcgcagttttattgctagctttttcagataatttcacttctgcagctgtgcaggaggcgatgatacgagttgtgcatgcgtcacctgatgcacctgaagtagatatatatgtggacaatcaaagcatcgtagtcggcgcatcgtttaaagatgtgacggattaccttaaagtacctgcggggtctcataaaatagaggtatatgccataggtacaaaaggaaaagaaaaacctgtcatttccactaatgtaaccgtcgaagcaaacaaagcctatacccttgctgctattaaccaagttgcacacttggaattaaaagtagctcaagatgatatgaacgtagctaaaggaaagagtaaaatccgaattgctcacttttctccagatgctcccgctgttgatgtaggtattaatcacggccctactttgtttaaagacactgcttttaaacaaatgacaaattattctgaagtagatgccggaacctatgatttgaccattacaactagtcaagacaagaaaaaagtagtggacattccaaaccttaatttagaagctaacacggtctacacagtgcttgctattaacaaagctgacagtcttgaaacgcttttattaaaagataatacggctatgccttctgaaatgcccaaaacaggtatgggcggtgcttcacaggataattataattcaattgtgccggttcttactttattaggaattggagcggtcgctatatttgttgttcgtcgtcacagaggatacgaaagcgaatgaaatggataggaggggttttcaccttttcttttatactattcatgagcagctggtttgcccaatcagcaatcgcaaacagctcgacggattttgttgggaagatggctgaaacaaaatcggctcaatccttgaaatcttcaggaactgcttctacgcctcttccatctcagcttattattccgaagcttcatatcaaggcttttataaaaggaatgggccttactaaccaaggtgaaatgagcgttcctgataatggtcatgatgtagcttggtttaagcttggagcaagacccggagaggaaggaaatgcggtcattgcaggacatgttgatgatcaaaaaggacccgctatcttctatcatctcgacaagcttacaaaaggagacgaaattctggtaaccgatcagcaaggggatcagctgacttttgttgttaccaataaagcttcttacccccgagattctgctcctatcagagagattttcggcccaacttttcaacaccagcttaatttaatcacctgtacgggaacatttgatcataaacagaaaactcatgagcgcaggctcgttatttatacaagcctccgcccggaaaaaacagccgatgtttctcactaaacatcggcgtttattacttttaattacatactcgttcgttttatttaaatatttacacagccttaatatgaacacaacatctcgctagtaaactaatgcacgacccctcaataaaaaggagttttgatatgagacgaaaatggtggtttgtaagctcactcactctttgtttatgcggtatttttatgtttatacatacgcaggcagcttctactcaagcagaaaaagtagccattattgctcatcgaggcgcatcaggttatgagccagagcatacgatgcaatcttatctagcagccgttcagcaaaaagcggattacattgaacttgatcttcatatgtctaaagatcagcagcttgtagcaattcatgactacaaagttgaccgaacgacaaatggaacaggatatgtaaaacagtatacagtgaaacagcttcagcgtttgaacgcaggaaaaggtaataaaaaagccgtcattccaactttagaagaaatattccgtacgtttggcaatcgaacaaactattatattgaaacaaaatctcctcatgaatatccaggtatggaaaaggaattgttgacgctgatggctaagtacaacattcataccaatcacgtcattgtacaatcatttagtcctgaaagcttaaaaaccgtccatcgataccgacctactatgaaactaattcaactgattcgttctaagcaaaccaatatgttaacagatcagcagttcagacaaatcaaaacgtacgcgaacggcatcggtccgaacgcaaacacgctgacaaaaccatatgtacaaaaagctcgctcttacgatttagacgttcatccttatacagtaaatgacgaaaaacaaatgagaatgcttatcgagtggggcgtaaccggtatgtttactaattaccccgatcgtctttataacgtgcttcataataaataaacacttgccgcggcaagtgtttattctttatacatctcttctattcgctctccacaagtacaggctaattaatgctatggcataaagcaaagcccagccaaacaccaaaaatttatttaatccttcgttaataaattgaatgattgcagatacgggtggcaatacatacagcagcagtccgcctccttgatatggaaatgaaacgcctgctgctgcaagcgtaacgattaaaataaatagaggtccaaaccacgataagctgccttctcttacaacatctcttgtgaaaacaaggcctatgctcataccaagcaaactaaacgtccagtgaataataaacccaaacaccatttgcctagtggatatgtccacttcaaacatatcaaggagcacaggataagcaatggaaaccgctgataaaaatgtaaacagcagcgtacagctaataagcttgctcataaagtacttgttctttttccctacatgaagttttgtaataacttcttgaccggaatcttccgcatgaaacagcgacatcgtaaaccaagtggttagaaaaaagaggaaaagtgccgtattaaaaaagctatcaagcaccgggttcggtctatatgtatagttcatacacagcgaaataatataaagtgcaagcggcggaatatatcgatacgatttaatgtatgtaataaaatgatagcggatcaatgcacccatcttaaatttcttccctttccatatgatatagctttacaacttcagcttgaacagcaagcaattctgcaagaaactcgtttacatattttttatctatataaaaaatccagtagtttccatgctgttcaattttcgtgcacttttcttttaataagcgaagcggcttattgagaatgacatttgcctcaataaccgttaaatgctcaatgagttgaacgcgctcattttttaaaatgcgctgtgagccaatggtgataacacgatcggctacagcatgaatgagcctttcttcatgacacgtaaatacaatggtcatccctcgttctttgagctttgtaaaaattcgttctacttctagctgagcacgagcatctaatcctgatagaggttcatcaagcaatagcagcttagaagaactcagcagtgcttgcatcatgttgactttttgcttcattccttttgaaaaagaaatgatttcttcatgtctaaactctaccatttcgaaagtttcgagcaactcttcaattctagagctgcgctttttcttagacaatccttgaattcgtcccatgtgctgcaaataacctgctagcgtaaaacgcagctcctgaggaaattgttccaccacaaatccaggcgtaccggtttctttatgaaggtgaactgtccctttagtcggtttagataatccgccaatcagctttaaaaacgtactttttcccgcaccgttttttccaacaatcgccacagtctctcctttataaagggtcgtatgaacgttttctaatacggtatgttttttgtatacttttgcaacattttttaattcaatcagtttttccatctgctgcctcgcctctccataatcctatatgttaaatcatagcatatttatggggaatgtgcttccatctctatacgtttcagctaaatttttccctcacaaaaaaagcctttgatatgatcaaaggctttttatagacaataccatatgctcttcatcgataaattcaccatctacttgaagagctcttttttcatacgcataagaagtaaaaccgaggcttttgtatagggcttttactccttcatttttagcagcgacggccaggtagatttgcaaaacatttgtttttgaaaaagcttgttcaacagcggtttttaacaacttctttccaagacccttcccccttgcttcaggggctacgtacatcccccaaatatctcccttatgctgaacttttaaaggcttttgctgctgaaaccctacgatccccacaagctgtttttccataaaagctcctactacaaattctgattggctgcttggaaaataatttcggatgtcagcaatttctttttcatattcttcttcataacttaaaataaaactttcgggatgatcttttaaagcacgaagacggagttcaaagtacatgtcagcgtcttcttttaccaacaatcgtatattcatgttttcaccttagtttcttatgttttaattagctattaagggttgtacacgctaaatacttcattccaccgatacagctcataataatttcccggcaggtctaagcctgaaataagtaccttatcatttttcgtatcttttacgcgtgttaaaagatttgcttgttttcgatttgtacgaatccacatcgtttgattcgttgctttatgataaacaggcgcataatctcctaagcctttttgtggaaatgtgaactgactttgcttattggtctttacgtccatgctatacaaaaaaggcagcggcctctttttttcatcattcgaccaccctgcttcgggcacacgtgaaatgatgatgttatctttttctgtccaagtaaaatcccaatctgcgaagccttttggagtaaacacatgttctttaaaaaccggcatctcttttaaagtgaactttttattttcagtggcaaaccttccttccccatcaataaatgccagtacttgctcttcattactccacttaaaccaattaggtacattaagcatatctcccactacttgaaaagctttcccttcttttgtaatgatgcacagcttatttgcatctgcagacatcgaagccgttggaatagcgataaaactaatccattgaccgttaggagaccatttgaagctgcttgttgtatacgcaaaaaacgaatcattttctgccgggagcgtcgtaaaagcctccactttttttacatctaaccctgcatatttgctcactgtatatagctttaccggtccccatcccgtcggcgccagcgcagcagcggacgtaattaaaaatcgatctccttctggaaaccatgaaaactgatcaacccctacggctacacgcttcttttcatgcgttttaacgttgtaatatactaagattccattcgaaatatacgcaagttcctcagcaaccggtgaccattgataatgagtcacatcatgttcaacaagtagcggttttccttttaacggtgcaatcattaaagaatcattttctgcataagcaactatatctccatgtgatgaccattgaggcatagaggcatgacgggcataggataactgcctttcggtaccgttatcatatacccataggtttccttgccttataaaactgaccttcactgtattggcagcatttatttgcatagggaacaacataagaaaaagcagacataacgctatttttttcaccatgttcactcctgtctttttttatagcgttacacaaatctcctcatctcatcacttttttgaaaaaataaaaaagcgcagcgaatagctgcgctttttgtatattatgattttgacttagattttggtgatggttttgttttagcttgtgctgtattattagctgcatctttttcttttaataagctcatacgttttttcaagtagtaaccttgtccaattccgaataagttaccaattacccaatataatgcaagagcagatggaagtgaaattcccgctactaagatgaagattggcataatgttcatcatcattttcattggaggttgaatttcatccgtcatacttacacgaatttgtaagaatgtcgtaatcgctgcaactaccggtaaaatgaagtaaggatctggctttcctaaacttacccataagaatgaatgctgtgcaatttcatgcgttcgtgcaatggcattataaaatgcgataataataggcatttgaataaagattggcaaacatccgccaaccggattaattttatgcgtttggtaaagctgcatcatttctttttgctgcttttgctgtgtttcaggatcttttttaccagcatatttcttttgaatcttttccatctctggacgaagtgcttgcatagccatcgtgctcttttgctgttttaaaataagcggcaatagaactaaacgaatgataaccgtcgcaataataatagacagaccatagcttccgcctgcccactcagcaattttcgttaatgccattgataaagggtaaacaaaataatgatcccagaacccgccgcttgttgcggttactggtgtttttgtgctgctacagccggctagagctaaaagaagcgctcccattaaaccaagcaataataattttttatttcttttcatattctttcctcctaataatgactaaatgtatgaagtgtttttcagaaggaaaggatcttcttcatcattattcttctctttaactggtgtttttctatacacatgtataaatacatttcgtcttttccatattgttaatactgaaggatcaatccctgcattcacatggtcggtgacaggttccgcatgaaaagccgtaaacctagcttcacgaagcatataataacaaaggatgtataaaacgaaagcagataaatacggcgcatatagaaaaagatcgtgataaaattccatgtgccagctctctttctgactataatagtacaatccaatatatgtagtgtagcatttacgttcctgttacacaacatcaacttatctctttgactgttctacgtattactttttaaaaagtttcatatttacgacacaaaatttgctcaccataaaatatgatgagcaaatctaataccattctctattctcgtatacttaccgatggttctcagtcttcttttagtttcatgaaccacgtaacaccgaatgcaacacctacagaaataatcataccaatgatatagtgaattaaattactcataccaagcggcgcagcaatggccatcattggaatacctgtaagtccgtaggcattggctactacgtgcataagtacaacatagcctcctccggctgctccgcctatagccgcagcaataaatggcttgcgaagtcttaaattgacgccgaaaataatcggttctgtaattcctaagaaggaagaaatagccgctggaatcgcaatttttttcgttttggcatttttcgtcttaaagtaaacagccagccctgctcctccttgcgccacgttcgcgcaggcccaaataggaagtaggaagttaacgccaatcttcggattagcaagcagtcctgcttcaatagcatgaaaactatgctgcaagcctgttaatacaatggtcgaatataagccgccaaacaaaattcctgcaaacactccggctacatcgtataaagactgaaggctgatcgaaattaagtctccaatatagcgaccgaaaggaccaataaacacaagtgatacaaagcctgtgataataacagttaaaaaaggcgtaacaagtaaatcaaccgaattcggcacaattttccggagtcccttttcaattttactcataacgtagatagccaataaaatcggaacgaccgtaccttggtagccaatcagcggaatacttaagccaaacaaatccatatattctggcttagcatctgctaatgtccacggatttaataacatcggatgcgttaagatccctcctataaccgctcctagataaggatttgaaccaaattcttttgcagctgaaaacccgattaaaatcggtaaaatgataaatgctgcgcctgagaacatatccaacaacacaaataacgcgctatcttctgagacccagtggaacgctttcatcatcccgagcagtcccattagtaaaccactggctacaatggctggaataatcggaacaaaaatattggaaagcatgcgggcaaaacgggcaaatgggttcattttctttttcatttcttcttgatgatccgctggggcagcagcctcgtcatcacctaattctttcacaaaagcagcatggattttattaacgagaccggttccaaaaatgatttgaaactgtcctgaatttgaaaaagccccttttacatcttctatttcatctaaacctttttgatcgattttgctttcatctcgaataacgaggcgcaaacgcgtagcacagtgctgcgcactagcaatatttccttttcctcctaaaagcggaacaagtttttcagcaatttcttttacgtccatcttacttcctcctttttgtatgtcataaaaaaaagcaagacctaaaacacacttataaaagacacacttgtccttcatgcgcattctaggtcttgcctgctttaccagtcacaatcccgattattcaattaatacgctttcattgtactcaaagcaacaatattcgtcaatgtttttttctatattctttgctctattcggcaaatgtgaagcgtgatatatcctaactccgcttctggaaaattaatttcgtactcatctttgacaaattgcttgatcgtttcagcacactgatacgattttttatatttgacttttaatacgttaagcatctcttcatccatctcatgaaagggttcattttgcgctaaacggtttaacgcaaagcgcaagtgagtcagcagccgctgataggacatgctgttttcatcaatctccatattcagctctttttttataatcgtaaccatttcattaataatcgttgtattcatcatgagctgctgcattcccggtgaattcagtttcgccgtatgaatatgaagcgcaatatatcccgcttcgtcaatcggcatcgtgatatctagtctctttttgatatgcttaagagcccatactcctattgcatactcaggctgatagagagatttaatttcattaagcaatttattttgtatggaaattccgcgggctatcctttcgacagcaaaggataaatgatcgctcaaagtaatatgcacatgatgacttaatgtagcagaaagctgctgttcagcataagaaatgatttcttccgccacttgaatatgctcttcaggaaggttttttaatagttcttgaaacttttcctgctcttctttcatgacaaagactttctccacttttgcagcattaataagatcatttttacctttttgaaaagcaataccgggacccatcgcaattttttcaactccgccttctttaaagacaacggcgttgttatttaacacttttaaaatcttcaaatgcgctctcctttcttaaaggaaaaggccttgctaattacttcatcgttacttttgcacaagccgtttcgcctttttgaaccgtcccttgagccaaaatttcgaaactttcacttgcatcactgtttgtaataacgattggtgtgataatgcttttcgctttttcttgaataagcgctaaatcaaatgtgataagaggtgttcctacgcttactttgtcaccttgtgccacgtgagcttcgaatccttcgccttccattgccactgtttcaaggccgatatgtattaatacttccgtaccggcttctgtttttaagcctaccgcgtgttttgtatggaaaagctgaacgacttccccagcaacaggtgaaacaacttgtccttctgaaggttcgattgcaaaaccgtctcccatcatcttctgtgcgaacactggatctggcacttcgctgattggcaggatattacctgaaagcggagctagaacggttgtttcttttgattttgtcttattaccaaataattttttaaacatctcaatcacccttttttagattgtacttgtagcataccccaatgattctgcagaaaaacttcccctatcccgatgttacgttaacatggtcattatttaaccatgcttttttggtcttgtaaataaaaatgtataagcgcttttataagaagcacgttctctatgctgcattttatgtaaccctttgcacattttctgaaggaggaatattgaattttaaacctaaaaaagagattgagacataaaaaaatgaatccaatctaaagacgaacaactcgtatacatgagccgaaccgcttttgacaccgcagttgatttccgtgcaagacttcgctttccgcgggcggtcgctgagcctcctcgtcgcatacactcctgtggggtctcacctattccgcttttcccgcaggagtcttcggcttgccctccaatcaactgctagaaagacttacaaacatgaaacctacgtttaccgtaacaaaaaaaacgaaccactaatcaaacatcttgatcagtggttcgtttttcacttcgtctaaaattcttttgtcccagcctcttgagattagaacgttgacgcaacttcttttgctttttcagatgcttttgctagaatattgtctgcttctgctggtgtgtaagccatgccttctgcaacaaccaggtggaaatcttgaaccccaatgaagctcatcactgtacgtaaatagctttgagtaaattctagctctgctgctgggccttctgagtacacgcctccacgagcttctagtaatactacttttttatctgaagctaatcctactggaccgttttcagtatatttaaacgtttttcctgcaattaaaatgttatcaatatacgctttcattagtggagggaagcttaagttccacattggagctgagaaaataactttgtcagcttgtaaaaactgctctactaattcacccatacgcgttactttttctaattcaacagctgataattcttcaccagctccagcttttccccatgccgctaaaacatctccatcaatgaatggaactgtttctttatacaaatcaagcgttgtcactgtatcagtcgggtttgctgttttatactcatctaagaaaacctgtgctaaacgagttgaaaatgatgcttcatcaacctgcggatttacttttacatataatacatttgccataaatgtcatctcctaaaaagtgtctattatcattaattcaagatattactaaacaaattatctttaattcgagatttattatataacgccattttttatgcgtcaaccttttcgcacaaaaaaactccgcaagcggagttttatacacattgaaattctcgaatttgatttacatctaccccagcatacacccagaaagatcctgtccagcgatatcctgcaactgagcgtctgcctacaaaggttgggtaaaaccagtaaggtcgaccatttctcggccatatataagtatatcggtataagcaccctgaaatagcgcctggatcaacagcataaagcgatggacctcctgaacctagctttggtgtaggtgtaaaagctggcggcggacttgaaggcggctgcgctcctccctgcggcggaaacccttggccccctcctccaggtggtggtggtggaaatccttgacctcctcctccaggtggcggcggtggaaatccttggcctcctcctccaggtggaaacgatggaaacccttggcctcctccaggtggaaacaaattttgaaaacgtggatcgtattgatatggatacatacgcactccccctttataatgcttgctacgttacaatatgcatcataatgaagataggtgaatgtctacttttatcttctatagactaattgaacgatgttaaacttggtaaacttaaaggggagtcttatcagaggaaataataaatccaacacggaaactacttgcgtgttggatctgcttgcggaaaatatttttcaataaaattatacagccaaaatacggtaatcaaaataggagctatcagaaaaggatgttgaatccacattttcaccagtaccttttcaaatgacggaatcgattttaacacttgaaataacgagcttccgctaaaaataacgctcgttcctatcaataaaaaagatagccagttaaattgatccatccacatgctcatagagatataaaaactaacaccggttcctatgccccccattattccacttaaaatactttttaccgaaaaaggaatccctacaaaccatccggctcctagtcctgcacaccctgctaaaatactagaaaaaagcagcggctgctcaagccagagacatgcattcactccaaccactaaggtgacatgtattcctacgtgaagggaaattcttttgccaacaggctctgaaacataatgatagtagcgcccgctataaaaaattgtccaccataataataataatgctgtcacacttgcccctataatcataaacacacctctctacgttatgattctattaatctctatctattattttcctaatatcctatgtctttgattcggtaatctatccatataccttccatacgttcgttcatcagcaagaaagtcgaatgtaactatattcttgtctcaactgtttacttgtgggactgctaagaagttgaatgtctgcatgtagaaaaagatagtgtagaacactttctcttatctttactattattcatatgtatagcttgctagatttagtcctcgcagtttagaatttttcagtcgttcatatgaaactatttgccctttctttcgttatatatatacacgtttctttatcttttcacgtgcaaaaaaagataaattcctataatatgttttcatattaacctttaaggagataaagaagatgaattgaataaatccctacaaatagagtttttagaaaaaagaaattgttatcatttctcctatttatgttatagaataattcatgtataataaaaggctgtatggtaacgcagcttgcgacatatcttttcttacttttagcaagtctatattcaaagcaaaaactgcaaagtggggttagtgcgactcttcattaatcgactttgcattaaaaaccagcatttttcttttatcataaagaaagaatgagatttaatagtgacaggtgaataatatgggtgaaaatcaaagaaatgttagtagatttgactggaacttggctttcctaatcttcctattgttttgcgtaagcgttgtggcaatccatagtgctgaaaaaattgggcagtatgataagaacttcgtagcgcaacaagttgttttttatattattggaatggtgattataggatttgtcatgcgttttgactccgatcagcttcaaaagctaacgtgggttttttatggatttgggaactttttattgcttcttttactagtggctccgtcaagcattgccagagaaattaacggggcaaaaagttggttcacacttcccggcttctcgttgcagccatcagagtttatgaaagtgtttttgattatcacgctgagtacggtcattgttaaacacaatgaaaaatatcgtatccgaacagtaagagaagactttttactgcttggtaaactaggcgctgtacttgctttacctttattgttaatcatgcagcagcctgacttaggtaccgctcttgtgttcttagcaatcacggttggacttgtatttgtttcaggcgtaagctggaaaatcatcgcgcctgcatttttaggtattacagcggttggttctgtcattttgggacttgttgtttatgcacctagcctattagaaaagtatctaggggttaagcaataccaatttggacgtatttattcttggcttgatcctgagtcatatagttcgggagagggctatcatttaaagaaatcgttagatgcaattggatcaggaatggtaaacggtaaaggaatcggaaatggagttgtctatttgccagaggggcagaccgactttatttttgcggttattggagaagagtttggctttatcggcgccagcattgttattagtcttttcttcgtactcgtttattacttgatcaagctaggccttgaaacaaaaaatgaattcaattcttacttatgtgtaggcgttatttcaatgcttacgttccacgtatttcaaaatatcggtatgaccattcaagtcttgcctattaccggaattccacttccttttatttcatatggaggtagttcactgatggggaacatgtttgcaatgggtctgatgtttggaatctcatggcatcacaaacgctatatgtttggaaatgattaaagagagacgatggtctctcttttttcttttatctccctattaagcatgctacaataaaaaaaacgcttccaaatcctgttttaaaaggagtagatatgcatgcttgattaccaatatcggcgcaaagcctatgctattttgttaaaacagacatccgtaccttcatctacaacttctttttccacctggctcatacagctactaaaacgaaacaagtaaaaaaggtgtgctactgcacaccttttatttgttcgacagcgacgttatgccaatttgccttacgatttttttactgtcttcatttagtccttttacaataacctttttattcaatcgctcgtacttatcgataatttttgagatgccgatcacggccgattgatcccatatatgagaagaactaaaatcaataatgatggtatccgggtctgtttcatactgaaattcatccatgaagaagctgatcgtggcaaaaaataattgccctgaaaccctgtattgcttcatattgccttctgtttgtgaagttgttttgattttagccatcttccagccaaatgcaatggtgcttaaaacaatacctaccattactcctaatgctaagttatgtgtaaacaatacgataaccaccgtaacaaccattacaatagcatccgatagcggatatttcgttaagtctttaagggactgccaatcaaatgtaccagcagctaccataaacataacgcctacaagagcagccattggaatttgtttaacaacatcgccaagcaccataattaagaacaataaaaagactccggcgactaaggtagataaccttccacgtccccctgattttacattaatcatagattgtccaatcatggcacagccagccattcctccaaagaagcctgttacaatattagcaatgccttgaccgcgtgcttctttatttttattcgaaggcgtatctgtaatttcgtccagtaccgttgccgttagcatagattcaagtaggcctacaatcgcgagaggaagcgaataaggtaaaatgataagcagcatctccactgataaatcaacctttggaaagtgaagaaccggcagcgaacgcgtaatattccccatatctcctaccgtttttaaatctaaatgaaagacaattgctacaatcgtcatcaagacaatggcaacaagcggagatggtattgctttggtcatgagcggaaacaaatagacgatgagcagcgttccggctaccattgcgtacatcatccagtttgctccttgaaaatgcggaagctgtgctgtaaaaattaaaatacctagcgcatttacaaatccaatcataactgtttgaggaagaaatgataaaaaccttcctactttcaaaacaccaagtaaaatttgaataattccggttaaaacagtagctgcaaataaatactcaatgccgtgatctttgactaagttaatcatcaataaagacattgctcctgttgcagctgaaatcatagctggtcttccgcctgtaaaagcaatcacaattgccatacaaaaagatgcatacaggccaaccatgggatcgacaccggcgataatggaaaaagcaagggcttctggaataagcgcaagagcaactgtcatcccagacaaaatatctgctcgaacgtttgaaaaccactgctgtttaatacttgccaccatgatggtttatcacctcttatgaattttttatacgattttcgactttcacgaaaatcaaagccgtttttaacgtatcaaatcgtaccatacaatttcctgtttggaaacaattaattttcacaaataaaaagacgagaagcttgattgcttctcgtctttttatttgttacgccgcagcttttcgctgccattcagcaaataaacgactttatgttcattcattaattgctgcttcaagcgcaacaacaatcatatcgttaaacgtcgtttgacgctcttctgacgttgtttcttcaccagtgaaaatgtgatcacttactgttaaaaccgataaagcattacggccgtatttagcagctagcgtatacaaagccgttgtttccatttcaactgccaatacgccgtgagctgccaatttttctagctggccgtcttcattgtaaaattgatcagatgtaaatacacttcctacttttaactgaaggcctttttcaacacctgcatcgtaagcgcgctttaataaatcaaagttagctgtcggtgcatagtcgataggaccaaatttaacgcggttcatttgtgaatcacttgacgaagacatggccaagataacgtcacgtacttttacatctttttgaattgctccgcatgtaccaacgcgaattagattttggacaccatattcattcattagttcatttacataaatagcaattgatggtacacccattcctgttccttgaacagaaacgcgttttcctttatatgttcctgtaaatccaagcataccgcgcacttcgttatagcaagttacatcttctaaaaatgtttctgcaatgtattttgcacgaagtggatcacctggaagtaaaatcgtttctgcaatatcaccttgttttgctccaatatgtacgctcatttcgtacctcctatatgtaaaaaatcttacgctttcactataccatattgtatcccttgcatgtctatttccttctaacattatgcgacaaaaataaaaagacatacggcccaaaaaatggcgtagtatgtctttttatataagggtacgctaatagcgcaagggatttactaacgttagctgaggtgatatgtatgggaaaaaaacatcgcaatcgaattaattcgcctaaaaagaataatcatattccaaaagaagcaattatagcagaacatgaagcccatggagatgaatattcagcaacaaaccgaaaaaatggccctggccatcatactcgtgattactaagggtcaacatataaataaaaagcggccagataggtcgctttcaccttatatttaacgtacgtgcaggcgattcactttttgccagccgtctgtccatagcttgtagtaatactttcctcgagtaccttcatcaattaacaaaatatcgcctgtgctgataaaccttgcatcacaatcttttggcaaattatcagcaatattaaacatctgaaatacttgtgttgctgcgtcttgatgatcgaatgctgtaatcgttagacgatggacaggcttatatccgcgcttttcgcctttttcttctgtttgcataatggttacatcatattctgtgctaatattaaattgtttttttattgtggtccacacactcaacattcttccctccacccaaaagcaagtatttactcttttacgtcatgtattcttatataattagtgataaaatcggaaaaccctttatcgaatcaaaacgttttttgtcgaaattactagttttttcttattaaacatgtacataaaatatttgtttcccattttatcattagttgtttttgaatggatgaatcaataggcctacttaaacaaaatgaaatattaacgaaaaaaatgtaaccattgctcctatttttggttatataggcgtttagaaaggaggtagacccctaaggaccaagcaagtcctaaacaatatcctgctagtatatccgttaaaaagtgtacgcctaaatacaaacggctaaatccaattaataaaataacaatagcaattacgcatgcagctgccgttttgacagccctgcttcttgtatacatccatatcaacaaaagtattccgctgtaaaacgccattgagttcatggcatgtccgctcggaaaactatagtgagaggcgggaacgacttgactccaatcaggtcttggtcttgcaaaaatctccttcaatccccaatttaaagcgcgaactccccaaaagacgagcgtgatatataaaacgagcaacccttttcgtttataaagaagaagtactataattgcaaaccatattggcgcagtaacataccaagatcctacggttgttataaatatgatgatgggggttaacgtgtccgtcctccatccttcaatggtatgaagcacattaaagtcaagctgtttcacccaaggtgtattaaatgtaaataaaatcagtaaaaagaaagctaaaagcgatacaataaatagagaatattttgtagtgcgatttaccattttttatttcctccaacctattaaaagaaaaagcatgtagcgttctacatgctttacttattcacacgttttggctgaatatagtcttctggcttaggagcttgatgaacgacaaattcagccgaaaattcctcttttgcatttatttttttcgtttgctttgattgcggcatatacctctctcctttctttttactgtctttaatatacgaaaaataaaggagagctatgcacattagctatagcgtgaaataatactggttaatatattttttaactgaggaatttctttttcagaaacatgaacatgaacgagcgactcatctgcatccagcatttcagatagaaagccgccaaaccctctggcacgtcgatctacttctataaataaattgtagtcatgtaagccgctcggctgcacgatgatttcaatttcatctactttcccagcgtacactccaccacttggaacaaattcaaattcttgaacaaaaggaagtctttttctcatccggcgaggggcttcttcgcactcgacttggcgcaagcgaaagccaagctgttccatagcttcaattgtgcttgttaccataaggttaggaagcacttttacatgatcaatatctgacggatcaacggcgtctttaatatcaaggctcgtcgccacccaaacccgggttctccctaatgtaacaggcgtatcatcaggcagctgaaaggtaaaaggaatagacttcgtttcagatggttgaatcgtgaacgggtcgttaatcttaaacgtattaagctcaatatcctgcttgtattttttatcgtctctttcttttacataagttgtgaatagacgcagatagatgctgtcaattttctgctcaacattgcctccgtacacttcaacaattccttcaatcttttcaccagcacgaaattcatcattgacaagcttagcgtccactcgcgctgcaccaattccaatgcgggctaacgctttattaaatagcgccatactttcccctccctgagttcttactatttatatagtcataaatatctttttgtaaacttttaatgctttcatacgattcatctgttctcagcattttttgaatgattgtcttaataggcgccgacaaatgtaactcttgttcccagcttctttcttgttgttccgtcggctcataaccagagtataataaaaataaaagaaaatgaccaagtgcatagatatcgcttgcagcagatgtttgtctcataaactgctgttcttctataagggtgcttgtttcttcatggtctcctaaaaatctagcaagaccaaagtcaataacatagatggttccgttaacatcaataatatttggaatacgaagatcacggtgaacgattccttgctcatgaatagcagaaactacgtctagaatattaagtaaaatgttaagcgcttgttcttccgtatatacgcacttctcttcaaaaattaaatcttcaaacgttttcccttgaatcaactccatcactaagaaacagccttcatctgtttcgatagcttcatacagtgaaggaatttgagggtggtttaattgagacagcaattttgcttcataatgataagacttcagcccctgggacgtgcgctgcttcgttttacggagctgttttacgactacctttttttgttgcacaatgtcgttagcaacatatgttataccatagcttcccattcccagtacatctatgatttcatagcgcccgcaaatgacttttccttttttaaaagggcggtcaactagccagcgataaaaatatttgaacattcgatttttcatcataaatcaacttgagaaaaagcttgagaagaaacttccgcttttacgcttgcgcttatagtggtggtgtccatattttgaatgactgtggctgtcataatatttgcttcgcttataatcgctactgctgctatggtgacgaggacgtctgtaatgatgatcactgctgctgtagtgacgagcacgtctgtagtgtcgatcgctgctgctgtagcgtcgatgtttagatccagttaatgattcaaaaatttttctgaacataaagaaaacctcttttcttaacatttattaccctttatacgtacgaaatgttataaaggtttcaaaaagtcccttaccctttttttatatagttaaacgtttcaaaggaggcttaacatgacttctactaacacaaatcccctcattagattggaggatgttcttcgcctgcagcagatgatgcagctcaaacctcctgctaccctcccgctgtcttttatcggagaagacgtaaaattgattaaagagattcgaaaaaaagtaaaaaaagctaatcaaaacaatgttacacgtacccaagcttatttagactattatcaaaaacaccccgaaattcactgggcttttttagcacacttggtttcgcggaacggcggctattacatgacagatctctccactaccttaataaaatccctgctttctccagaaaaacagcacgcgtacttcttgtttttagaacattccaattccgccatttttcatgatgcttacgctcagctgttactctatgaaaaaagcaaagagcaaaacagcaatctgtttcatttactccccgcttttcacatatcttcttttatgaaagctgtttgggatgacttttggcagcatagaaacaaaacgctcttatcaatggctctgattgtgaacgaacagtatcatattgaaaaaaatgttctctttaaaaaagagtttcagcgggatgttcttcactcttggcagtttcatactcaaaactttctcggtatgactcaaatcgtctttccctattattcaggtaataacattgatttatgtggaacaaaagtgtatcatttcgagtctgtcttaaaacggattgaagtgggaaaaactttatacgttcttcttttttattcaaacttgcatgattctatctatacatttagccttaaacacccccacacagggtctcgaagcgattataattcggatatatttacaaagaatcgaactgattccaaaaagctgtatagcccgactttaactatgagctggggagaccgcgtacacctttttttaagaaaagatgagtggtttgaagacgaaatcacattttctctccttgagtctattcccgcttcttccgttaaaaaaattccccttcagcatcatataaaagtgcaatccgctattaaagctgctaaccctttttcatagccgctgtctcataaacaaaacgacgagtttccccgtcgttacagatgtatctatctttttattcctcatcttgctcatcaataatacatttatcaatgagataatcaaaagttatatccgctaattcgcctagctcttcttcagcgggaacatagcctcgcttgactagttcattgtaaaagaactccgcaatttcttccgtatcaatgaccacttcgatttctttcacaatatcactccttatcccgtttgaacggattagcgtaccttatttttcttaaaaataggttcactccatcttctgcttgaagttttaccttatacacatttatgaacaattcggcaatagtatgtctaaaatttcagcagtttaaatagaaaggtaattatacccattcttttttcattaccatcgccgtatacacaataaaagatagctaagagagatgtaatgatctatctcggctatcttttatttattaggcatctacctgctattttccttgttcggattttgctatcttttttaaatgtttcagcactaagttcatgacttcagcgtattcttcatcttcaaaaagctcatacaaaaatttataatcattgtacacatctaaaagaccgtttataatctcatgcttttctttagttaacctcacttcttctttttcagaaccgttttgttttttcatctttggtagcaactccgtctttttaatttctttacctaaatacaacatatcaacactctgagcgtaattttctgtttcctcatgaggagttacgagaatgagttcttcttcactagcctcaagccattctccatctgttacacgtgacaattcatagacaatatcttcccatgaatcctctttataacgccatatttctgttcgaataccaatgattttaaataactcttttccataattaaaaacctggacgatatcgccgaagaaaaatttatattcaagctctactctttcctgtactaatatttgaccttcatattcttctagaagctcaattgtatcttctaaaaaaagaccttcactatggttgatttcgtatacaaaaatcccatccatcacttttatatcggtaatagtgccaacggtcccgtatattgttacaacgactgtttcaccaattccgtatttaggttttttcttccctgccatcgtcgcacctccttagtaaacatacacctactgaaaagttacaatattatatgcagtaactaaaaaaggggaagtataacatctttagaaccaagcctttattatctattgccctctatcatttttacccctgcttattgcatgaactaaagaaaataaaaaagcaggctgatggatatccatcagtctgcttttttatccctcacgcattattttgataaagctcccatgcttcatcaaatacggtcatacttgataaataatgtccgttgagctctaaataagaactcagttcgtcataatctgttgaagatttcgggaagctgtgatcatcataagcacttcgcgcaaactctcccattcgatcatgttttttatttgatcggaatttcattatatagtgataaaaggatttcatcgtactccccctccagcggtatgtgtatcttttctatcattttttcaagaaatctacaactttcttctttaatatgtagatgtcgaacactgcaatataagtggtttactggacaaaatatattaaattcatgttacagttgcaaaacaaatttcactattagcgtaacgaataaatattgttatatcaatatttttcttttttcaaaaagacatttgtaacaaaaacacatcgtttttataacaaaagcattgattcgacaggtttctcaaacctttatgtaattgcaaaaaagaagaattcatgttttaattccgtagtgaaaggttattctaacaataatcgccatttaaataaattttgttggtgggaggtttacatcagcatatgttgaggaaaaataatactatgaatactcgaaatgcttactttgataatgctaaatttgtattaatttttttggttgtatttggacacatgatttctccgtaccgaacagatagcagcggaatgctgtccatttatcactttatctttattttccatatgcctgtctttattttactagcaggttatttctcaaaaaattttcataaaaaaggctattacaaaaaaatatttacaaaggtggctcttccttacttagctttccaaactatctataccctttattatagtgtgctttatacagatgaaacgtacacgcttcaatatttggttcctagatgggcaatgtggtttctactgagcttaattttttggaaattaatgcttcctttctttgcgaaattccccatgtggattagcttaactgtctctatttcgcttggacttgcaatgggcttcattgatattgacggatttgataaaattctaagcattagccgaatgtttgtcttcttcccgtttttccttttaggctactatttgtcgcagcggcaagagccttttacaaatcttttgacagcgcgaaatcgaatcattgcatccatcgtattgctagtgacattaattggaagctattctttcttagacgacacggcttacacagatatgctgtatggaacgaacacgtacgacaatgtggccgaatttttaatgcgcgtttctcactatgggattgcttttcttgtatcttttgcctttatggctttaattccaacgcgcggatttgctttaacaagcattggacagcgatccctatacgtgtatttattgcacggcttcattttaaaatggttctttacaactgacttctcaaaaagtctagagccaacatcatgggggattatcgtcttaatcgcactgtccattttagtaacgatgcttctcggcagccgtatcgtcgattggttcatcacaggtactaagctgatcgttcagtttgttacacctaaaaaagccattcagaaattttcattagcattcaaacgtacgttttcataaaagtcatactcctaaaggagtatgacttttttcattttctttggagaaaccaagtaaataatttcattttgctgaattttatgttaacgttttaatatctaaaggaagggagtttttcaagatggaattagcatattatggtggagagtttagagatattaatgaggctgttattcctattgatgaacgcggtcaccagttcggagacggtgtttatgaatttattcgcgtatacaaaggagttcctttttcaattgaacgtcacttagaccgcttagaaagaagtgcaaaggcaatctttatcgagctgccggtttcaagacaagagctaaaggacatcattcatcaagcaatggaaaaatcaacgttaaaagacgctgatatttatattcaagttacgcgcgggattgctcctcgaaatcatttatttcccgatgtacctacacaattagcactcacaatacggcaccctcgccaaacacctgaagaagcctatgaaaaaggcatttccacgcttcttttggaagacgaacgatgggctaattgctatatcaaatcattgaacctacttcctaaccttctggccaaacaagctgcggcttctaaaggatgtaaagaagctattttagtaaaagacggatacataaccgaagggtcgagcagcaatgtatttgcgataaaagacaacgtcttgttcacgactcctgccacaagaaaaattctatccggtattacgcgcgctaacgtgctggaatgtgcacaggaacaagccattcaaatccgcgaacaaaatatgactccttcctttttaaaagacgctgatgaagtttttattacgagcacgtctgttggtctcttgcccgtttcgaaaatagacgaagtcgaacttccagctttccgtcctgttacagtggctttaaaacacgcctacagcctgcgcactgctggaacaaaggcttatcaataagcaaagccgccccttacaaaataaggggcggctttttagaatttaaagtagttgcgctttaataatctgggcacttttaataactcatcataccgaatggattcatcaagtttttttgtatcgacaagaagcagctgtgtttccacttcttctatgatctcttcttcttgatatgacatcccgcaacctgaacagctgatacatggcatatgagtaatttcaatacttctcgttccatctggcaattcccagtaagcggtattggttgtttctaccgctttttcttcttcgcaccatgcgcattgaacagtcatattacaggacctccttaagatgatggagcatcgtcgcttttaacgtcttttttcaattgagctttaaactttttatcttttaattcatctcttttttcacgtttatcttttagactttcgtgagcactgtcactttcatatgttttacgtctttttactctccctaacccttccggtacaaggttgaattgagcatcattcataaggcccgagatgccgatggaagaacctttagcatccgctgctggataaacagctcgaaaataatcatctgcacgcccaggcacatagctttctggctccggatacgtggtaatcactccttcaaagtttcgcagaacaactttacttgcgctttgactaataatatagtttggctgaactgcaatctttcctcctcctcctggcgcatcaataacaaacgttggaacagcatagccagaagtatgacctcgcagcccttccataatttcaagccctttggaaacaggtgcgcggaaatgcccaattccttctgacaaatcacattgataaatatagtaaggacgaacgcgtattttcactaaatcgtgcataagctttttcatgatagctacgctgtcattaatcccagctaaaataaccgcttgattgccaactggaacgcctgcatcgacaagcatttcacatgctttttttgtctcttcagtaatttcaatggatgtattaaagtgagtatttaaccatactggatgatattttcttaaaatggcacataaattttctgttattcgctgtggaaacacaacgggtgctcttgtgccaatccgaataatttccacatggggaatagctcgtaaattcttcaaaatatattctaaaatgttgtcattaatcagcaagccatcaccgcctgaaatgagtacatctcgtacttcaggtgttttggcgatataagcaatcgcagcatctaactgcttttttggaacgcccattccgatttgtcctgaaaaccttcttcgagtacagtacctgcagtacatggaacattgattggtgactaagaacaaaacgcgatcaggatagcgatgagtcaaccctggcactggagaatcttcgtcttcatctaggggatcttctagatcatattttgttttatgaagttctttgccaaccggaacagactgcatacggacggggcagcgaggatcatctggattcatcaaagatgcatagtaaggcgtaatattgagcggaatggttttggttgaaatgcgtactccttcttcttcctcaggagttaagttaataaccttttttaaatcatctaatgttcgaattgtgtttgttaattgccaaatccagtcattccatttttcttcaggaacatctttccataattcaatatctttccagtgtcgggacggcttatataaatcatataacatacaatcgctcctttatgaagatttactattgttatatgttacagcccataaattggttaattatttctcaccctttactttttgacagatccttcacccatacgttcatatcttctaacgatttataaatgtaacaattattcgttaaccttcccgtataggtatagccaagctgctgaaaggcggcgttcatcccaaatgaaagcgctctcgctattgtatatgcacaaaaaatatgccgctgttttagctccgcctctagtgcgtttaataaatgcttcatgaatccatactttcggtaagcagggagagtcgcacaatccgttagttcagcattgtgatagacatagtcaatttcagcagaagcagcgctaacgatatcgttcttgtcaactatgatataaaacaagctatcttcttgaagcaaattagagagatactcttcttcgtagaggggagtaggatacactgtgaagatttgacggtagagctgagaaagttgtttagcgtcagatgaaatggctcggcgcatgatcagttgattcgataaagaagaataatcagatgtcggcaaattcaacacatcttgaagcagctctgtttcttttaacgtctccccgctgtctcggcgggattgagacgtatagtagcataaaagatacgcgtcgcttccgttaaaatagtagggaacagttgcttctaaagaaaatcccaagcttatccagtccatcagatgttcagcacgtgcttttataatccacttttcatacgttttcttatcaatttctttatatatatagctgtaaatatcgttcacatttccccggtaatcatctattctcagacgcttgttacgttcatctaaaaaaagagtcatagcaaaggttggttgacaaatattttcttgtttccccatttgtttgtatcctctcctttttagcttagtccgcaatactgcaccagtctgctacagtgagagcaataatttctgctgcgtcaagcatcgtttgaatacaaatatactcattcggaaagtgggccacttctgttactcccggtccaaaaacaactgttggaatatcccctacttgtgacagtatccctccgtccgttccccaaggagatgcttcaatgatcggctgattctgtttcacttgataaaaagaggacgaaagagaggtcataagcggatgctccaattcaatttcaccgggaagccagtgggccccaaaccattccaagtcgacaggatgctcagcaaaccactcatcacgctgaggcaaaagttcaagccaggatttcatttctgctctgacatttttcattttttcatgcggagcaactcctatcctgccttctaatattacttgatcagcgactgaagaaggccacgtgccgccttgtatatttccgatattaatcggcacaggaatggggattttattatagagcggatccgtaattcggctgtttctctctttttcaagaccctcaatgtgtttaagcacaacagctgctttttcaatcgcactcacgccttcataccgagtccctccatgtgctgctactccatgcacggtcactcgaaaccacatggagccttgctgcttagggaagatcttcatgttggttggttctggaataatggcaccatctgctttataccctctaagtacacaggaaagtgttcctgcacctccgctttcctcttctactacgctttgaaaaataacatctccttttagtgaaatatctagctctttcaacgcttgaatagctaaaagtaacgacacatttcctcctttcatatccgttgctccgcgtccatataagtttccatcttttacaacagccgtataagggtcttccgtccactgtgaaagatctccgggtggcactacatcaatgtggccattcaaaataatggatttccctccgcctttcccttttaacacgcctaccacattcggactgtctcgaaaagtagaacggttggaggcaaaagcttcatggctgcgaagtattttttcgtccggttcccatatatcaatatctaactgcagctgtcgaaggcgttcaatgacaattgcctgcgcatgcttttcagaaccttgtacgcttgcttcttctacgaaacgcttgagtaaacgcactgcactttgacgatgctctgtcatccagttatgaatagattgctgtatgttcatataatggtcctccttatggtatcgtaatcaattgatcactcaggcgaactgtcgcttctgttgaactcaaaatatcctctacagtataaggagacattaactctgttagaagaagcgcatctttttctactttaaaaaccgcccgatctgtaataactaatcccacacagcccgaagcagtcagaggtaaagaacacgtcttaaccagcttcggttctcctgtcttgctcgtatgattcattagcacaatgacttttttcgctttttgagctaattccatcgctcctcctatcccaggaactcgcttacctggcacaatccaattagctaaatcccctttttcactcacttccaacgcaccaagaatggtcatatcgacgtatccttttcgaatcatcgcaaaggctgtagcactgtcacagtatgaagccccttgaacggtagttgttggatagcctgctgcattgcaaacattctcatcttcttcacctaaaggaggggaagatcctaaccctaaaattccattttcagcatgaaacatcacatgaacagcgcttggtacgtaattaggaataagagaaggaatgccaatccctaaattaacaatcatgccgtttttgatttcagccgcagcacgttttgcaatacgatgacgaatatctattcccaaacccatttccaattcactccttttgaagggacaatataatccacaaatacacctgaagtcatcacgttctctgggtcaatgtccccaagaggaacaatttcatccacttcagcgatagttatacgacctgccattgccattaacggattagtgtttcgagcgcttttatcataaagcaagttgccgaatggatctgctttttttgcatacacaaaagcaacgtcggctgtgagcggcttttccactaaaaatgtcttgccgtctatttccactttttcttttccaaattgaataatgtcattttctattcctacatcaatcagtactcctccgagtccaactcctcccgctcgaatccgttcagcaagcgttccttgaggagaaaactcaacttccagcttttcttctgtcatcagcgttccagccactgggttcgatccaatatgagaagcaatgagcttttgaattcttccttggcttaccaattttcccgcaccaatatgaggaaagcctgaatcattacatatcaatgtaaaatttgattttccgctttcaatcagaccatcaatgagagaaggcgggctgcctactcctccaaatcctcctatcatcagcgtagccgcatgatccacgtattcaatcgcttgttccacagttgtgatcttttgaaatgagttttcgacctttgtcactcatttcacctcatttctctgtttttcattttgcacttcatgcaatgttttcgaaagcagatcgaccacttcatcaagctgacgatgagtaatcgtaaatggcggcgcaataataataccgtctccttctactccgtctgttcctgcttgtgaaggataaaggagaagaccatttttttgggctttacttattacgcgcgccgtcatattttccgaagatgaaaaaggctccttcgtctttggattttgcacaagctcaagaccaactagtaagcctttgccacgtatatcaccaataatagggtaaagaagttgaagcttcttcaattcccctactaaatagtctcctttcagcgctgcttcttgaacaagatcatgcttttcaatataggttaaaacagctatccctatagcggatgacagcggattagcgcttagcgtatgtccgctcataattaatttggatccgttcatgataggttcaatcgttttgctgctagccaacgtaacggctattggcgtatatcctgctcccactccttttccaagcgtcatgatgtctggtttaactccccagtgctcatacgcaaacattacgcctgtacgcccaactccagtcatgacttcatccgcaatccataacacatcatatttatcgcaaatttctcttatcacttcataataaccgggaggaggtgtaagcgctgctccggctgctcctacaatgggctctgtaataaaagcagcaatatgttcagggccggttcgtttgataactgtttccaattcgtttgcgcaagcaagattacaggatggataggtttgatgaaacggacatcgatagcaataaggaggcgaaaccgaaggataatcttcaagcaaagacgagaagcgttttcgtcttccaacgtgccctgacatagacagagctcctattgtaataccgtgatagctcatccagcgtgacaaaacctttgttttggttggcttcccttgctcttgaaaatgctgaattgccgttttcatagccgtttcagtcgcttctgtcccgctgttaacaaaaaagctccactggaaatgattgctgcttaattcacatagtttcttagctaaggcttctgttggatcacttgtaaactgcgaccgatatacaaacgcaactttctgtgcctgatcggtcatcgcatcaataatttcttttacgccgtgtccgatacttgctgtaactgcccccgacgaagcatctatgtacctttttccatcttggtcgtacaaataaattccttttccatatgaaataactgggtagtcgtcgtcgagcagcggctttattacatgagttttattcatttccgcactctcctttcaaacatacactcttattaaactgtatgctgaaatgaagagtttcttgccaataaaaaaagccctagcatatagctagagcttttacgcttattaagctgattgcgttacagatttatcgatacgttttgcttctgactcagccacaataacggcacacgcagcgtctcccgtaatatttacagatgtacgaagcatgtcaagcaagcgatcaattccaataatcaatccgatacctgctacaggcaagccaaccgaactcaataccattgctagcataatgagaccaactcccggcacacctgctgtaccaatactagcaagcaccgctgtcaatacaaccgtcacaagagcacccagcgacaggtcaacgccgtatacttgtgcaataaaaatagtcgctacaccttgcataattgccgttccatccatgttaatggtagcacctaatggctggacaaaactgctgatggactccgggacacgaagatttttttgagccacattcattgaaatcggaagcgttgcattactgcttgatgtactgaatccaactgtcatggcaggagcaaaacctttaaaaaattcaataggattacgtctggccataagagcgactgatcccccatatgttacgatcgaatggataaacagtgcgagcacgactacaatcatgtacagccccatcgctttaattgcctcccagccttgacttccaaccgcggttgcaagaagcccaaatgttccgtaaggagcaaacttcatcactagatttacaagatacatcatcaattcattgccttgctcaagtaaattgtaaagcccttttgttttacttccaagcatcgtaataccaaaaccgataaagatagaaaaaacgataagttgaagcatattcccttcagccatcgcttgaattgggttgactggaatcatatttaagaatgtctctccaaccggcggtgctttttcggcttcaaaagaagcgttttttgtatcaaaagatccaaacgtacccggtttaattgcatatgctaaaattaaaccaataataatcgcaacggttgttgtaactaggaagtaggaaactgttttagccccgattcttcctagttttttaggatctcctaaacctgctacacctaacgtgatagagaaaaacacaattggtacaacaagcattttaattaagcttaagaaaatttggccaagcggtgtaaacaagtacttgtccagcgaagcaaaagcacttggagcaaaagcattgatcaacactcctacaacagcaccagcaattagcgcgataataatctttgtcgatagcttcatagatttacctcccataaataaattatattagaatgattctaactaccatacttattttaccatgcattgagagcgataacactcaaaatatacaatatattaaaaattttcagattaatagtttaggaatatttttagctatacaaaaaaccatgagaatatcatggtttcatagacctgttattccctcactgaatgcttacggagttagctgtcggattcgggtacgtgagttaccctacttgatttattcaagattcaccccaagtacactacgcacaaatatgggtcccccgttctcttataaaacaaaagagattaagcaaataattttctttaatattttttcatgataataattcttactttaattaaaattcattttatatgtttctgtcaagtttttattcaaaaataatgcaggattttatcataaaaagttgagaattgttatattttaaaatatttacatcatatttcaataaaccacaaacagttatttaacaagacttaaaatctaatggataaaaaattaattcaaaaaatagtttgtaaagtgaactttcttctcattaaattacattcataaatttgcataattattctaacacccgcgtactttactgctttcataaatattttactcaacaaaaaataactctttccaactgttgattttatccttgtattgcttgatataccctccctgaaatttcactgaatttattgatgcaaagaaatggacattgtcaattcgccttattctatttaattcggctcacgatagaaggatgtattccgtcatactttttaaaaaagagcgggtaattatcatataaaactatcggagtttgagcggtacaagttctttactttttacttagtcgctttcgttatttaacatatataaaaaaagaggccgtgacggcctctttttttatacagtaacaggttcagaacttgctttgcgattctttaatttttcaacaatgtcacgtgctacccacacaccgcacgcacttgcctgcgcgagtcctcgcgtaataccagctccgtctcctcccacgtataaaccggaaatttcagtttcaaacttatcatttaacttcggacgggcggagtaaaatttcgcttccacaccgtaaaacagcgtatgttcagatgctaacccaggcgttacatgatccagtgcttctgtcatttcaattaagcttttcatcgtattgtaaggaagcactaagcctaagtcacccggtacagcttcttttaacgttggttctaaaaagccctctttaattcgagtcgctgttgaacgacggccctttaaaatatctccatacttttgaacaactaggcccccgtttgacagcatattagctaatcttgatacttcatgcgcatattcgttcggctgatcaaatggatccgaaaatttatgagaaacaagcagcgcaaagttcgtattttgacttccaagcttcggatctttgtatgcgtgtccatttgctaacataatacctgaatgattctctactaccacatgtcctgaaggattgctgcagaacgttctgactcttgtacctacagacgtattataaatgaatttcccttcgtacaagtgcttgttgatttcttccataacaacgttagatgtttcgactcgaactccgatgtccacttgattgttaatcatttttaaacggcgtttttttagtaagtcgctcatccacttcgagccgtctcgacctggtgaaacaaccactttatcagccgtaattctttcaccattcttcaattcgataccgcgcacgatatgctgaccgtcttctttttctgttattaaatcggctacttccgttttatactgcatatcaattttttcttttaagtattcataaatgctttttaaaatttctaaattttgctctgttcctaaatgacgcacctgggcacgcaatagctttaatcctgctgcgtatccgcgtttttcaatttcacgaactttatcagttaacggatccgtaatcgtatcggttgctccgtgttttaaattaatttcatccacatatttaattaaatctaccacctgtgattcagacagataatccgtcatccaacctccaaattcactggtgatattaaatttcccgtctgaatatgcgccggctccaccgaaaccatttgtaatagaacaagcgggcaaacagccagcaaactcttttttgccaaccgcaggcggacattttttgatttttttctgaagaatcggacaattacgtcgatagatatcgtgtcctttatcgattaataaaatagttgcttccggtaattttaacgttaactcatagcaagtaaaaatcccagcgggtcctgcccctaccacaataacatcataatttgagttcattgtacattctcccatcatctttttttctttgggtaaaagataaaagttattgaccgaattttctttttttattatcattcggttattttctagccatttgataatatatcaaaaacaaaccctttagtcaacaatatacacgaacattaaaataaaattttaaaaaaacattcgtttttattccaagcaaataaaaaccagtgaacgaatagcaagcgctataaaatgttcactggttctttaatgtacggaagagcaatttctacttttgttcctactcctactttactcgcaaatgaaatatgcccttgatgctgttcgattattcggtagctaatcattaaccctagccccgttcctgtttgtttagtggaataaaacggttcacctagccgagctaaagattgctcatcaattccacagccttcatcctcgataatgaccatgccgtattcatttcttttctcaacggtgactttaactgtccctttgctcattgactcaagcgcattttgaattaaattaataaaaacttgtttaagcgcattttcttcacaaaagattgtaatctcatcactaatctcattaataatacgacagtttttataattggcgtgtgtatctaataataatgtcacatgacgtatgatttgattgagacttttggggtggtatgaattttcaattttaggcttggccagcgttaaaaattcttgaataatggattcgacgcgattcaattcttcaagcataatatcattgtattcttcgttgtactgtttcgatgcttttaacagctgaataaaccctttaatcgccgtcattggattacgaatttcatgtgctactcctgccgctaacttgctcaccattgtaagcttttcagatttgcttgccatttcatcatatttttttcgatccgttacgtcgcgaataatatactgaatggcatcctgtccttcaaacttaattttggttgccgaagattcaataatgacgactccttttttagttaatagtttcacatcaacacgtggcctcacggacattccattcatcagctgaaccattcgttcttttacgatttctaaatgttcggggtgaataaaatgaagccaaggacgcccgatatactcttcttttttctcgccgccaagaagtttaacaccagcgggattcaaatattgaattctgccttctcttgttacaataaatgcatcttgactttgctggacaaactgcttatattgcttcatttttcgaatgacttcctcttgcttttcaatacttgaggaaaactctttccactgaacaactaagagcggaatatccccttccgtgcgttgaatatggatgtgcatcggaaactgctgatctacttttttcttaagtaaaacaacttcttcctcttgctttcttaacggttccacttcatgcttttcaataaaaaagcgatttggctcttcaaatacattacaggaaagaagtcgttcttccgtcgttttaaaaagatggcagcacgcttcatttaaaatttgaatatctccatccatattcattacgagcattggtgtaaatgacattgaaaatagctgttgaaatactttttccttttccatatattcaccttcgcttattgagttactagctatagtataatatggtaaatgttgatttggcaaaatttttttattatttaaacaatttatatataagtttgtccttttctatctgttataaaaagctcgcacatgcgagcaaatgaggcctaatcagcaaaaacaggtgcagccaatgatgattaataaaataaatagcacaacaattaatgcaaatgactgacccgttccgcaatgatgataaccgccaattggatagctaattgaatagtggcaagtatcatataggtggtgatagcctccgtgatggcatgggtcgtaacaatcgtagttatacatagcaatctctcctcttgttttttttattcatttcgtacactgtactttatatgcgttagttgattgtcctgtatgtgcattcgcccattttttactttctcttacgccatattcgccttttgggctgcagcgtatacgaaaacaacaaaagtaaaatacttcccattaccagtaacgtagtaaaatctttcagaaactcaataatgacccctatatacgggagatggtatgcgtagcttccaatcactttaaaagaagcaggcaaagaatctctttgagctgtaaccagtacatcaagctctggattatgggccagtacaagttcattctttgaagaagataattcgtctctaaagacaactatatctccgcgatgcagatggtgataatccgtttcttgaacggtcacggtgaaaccaaataggcttggaactgtactaacaaataaaaatgtaaagcagatagcataaagaacaagtacatatcgaaacgcagaaaacatacatttattcatcataggtaatcagctcaattcgctcggttactttatttagcgcgggggtaatgtgaataaatgaagtagagcgctctgtaaattgaattaaaagtagcagcagtaaaaaacttaacataattaaccgtagcatccgagcataaaaatcgcgcatgctctcactccttttttctatactaatttcggtcgtacaataagccttcagtcaataatttgattcagtatatgcacatagagggcatttggctcattgtttcttcttggaggtctcgggagtgatcagtgatcggcataaattatgaattttagcatatgtttggttacgtatggaaatgtttttatactccgacaataagggagctgaacatatggctaattattcctttgatcaatatattaaaaaagcaatgaaatacgattttctagctaactactataagtatagtgatccatctaagcatattcattattatcaaaagcatttgtactatatccagcaggccatcttaacttcttctgaaaatacgaatctgcgcgtaaatccgccgcaaattcgtatacttcacgcttctccagattctccatctgtagatatttatattaacaacaaacgagtgattcgcaacttaacttataaacaagaaacagattatattgaattacaagaacctggaagatatacaatttctatttatcccgctggagaaaccggaagacctgttttaacggaatcatttacatttgaaggaaaccaaaattacacggtagcggcggtagatgaactaaacaagcttgatttattgtttatctatgacaatacggatgtaccaagtggagaaacaaagcttcggtttgtgcacctttctcctgatgctcctgctgtagatattgcggctagaggcggagacgtcattttttccggagtgcagtttaaagaagtcacaaaatatttgcctttgtcccccatgcatgttcaacttagcgtacgcatagcaggaaccaaaaatgtagtactcgaaatccctgcactgaaccttcgtccgaatcgaacatatacggtatatgccgtcggatttgctaagagccgtcctgcattagaagcgctgatctcccaagatcgttaacaaaaaaaaccttccaaattggaaggtttttttattcactgcgcgaaattaaacgtacgcgaatatcatcatttttcaaatcaaacttttgtacttttacagcaaaatcactctctaacttcatctgctgtaacgctacgtatactgattcattctttggatcaatcgttacccattctggtagcgcaaagttattatttacgtatcgaagcactgtgcggacaggaagctgcagctttccaacagaaagtgactgctgttcaagcacaatatctccatttttttgtacgattggatcaaatgtcattcgaatattaatgtcatcgccgaatacttgaatcgtaccgtctactcttactacatcggtgagagtaattttgtagttaagcggctgattcttaaattctttctttaaatatttatcaatcagtacatttaagtccgcttttttagccaaaatagttagttctgcgtctccttctactttttcagagggagttggattggccttgtcaaccggttgaaaaataaacgcaataataaggatagcccctagaacattaatccctaataacgcgataaatagggttttccacttcttcatataacaatctccttactcgttcccactctctttcgtgtttttctctttttcatcagatgtaacttcttttactgtttcctttttctgatctccaacgagaggatcttcttcctccattgatttactaatgcgttcagccattagtttgtacccttttttattagggtgaaactcgtctttccctaataaatttacgtcagaatcataaaaaatatcatcaatttttacataacttacattatcatattgagaagcaattttctcgcttgccgcattccattcattaataacgacattaatttctttcacatcacttaatgatttaaagaatggattataaaaaccaattaaataaatatgagcattaggattaagcttacgtatacgtgaaaacacgtcatttagacgtctttcatattttgactgctgtgattcaaacgttttaattgagatattgtaaaagtaatctcttaccactttcatcacgtcattgccgccaatcgtcaagaaaacgatgtctgctcttgatacttcagctgctactcccggctgatttaacctcgctaatagctgatccgtccggtttcctcttttgcctagattctctgttcgtacattttgcacttcattttgtttagaaaggtatttagttaagtatggtacataaccgccttttttagactcatctcctactccttctgttaatgagtcaccaatggctacaatatctaaatctacaggaaaaaagcctttcggaatatgctttttaggtgttaaatccacttctttctgaacggcttcttctttattgtccgtcggcaaaaaagtcgtcgtcgaacagctcgctaacaccaccgcactcatactgcttatcactatacttttccattttctcatcataacacctactaactatgctgtattctcgctgtcacaagcaatactgcttaccgctctgaataactatatctttatatcttatcatactatgtcaagttgatattttactacgtttcttatatatagtatatgtaaaaaaaaggataagcatgtttctttcataaaaatatccgctaacacatcactataaagatagctgtgtttggcggatagatttgacggatttatagctcttactgaagggttttgatatcttttatcatatcttcataaggaggatcagtcactccctgataagatttttgaatgactccatctttgtcaattagaaaaaaatccgtaccgtgaataacctgcggattttcttgcggctttttcacaatcgttttaaattggtccagagcaaacttttcaatttccgcttgtttataacccgttaagaaatcccaattcgaaaaatcagcgccaaatttagtcgcatagtccttcattttcggtggagtgtccacttcagggtctacgctaaatgaaacaaagcgaacgtccagcccttcatccttggccattttttgtaatttagccatatgagccgtcattgggggacatacggtttcacagcttgtgaagataaagttagctacccaaacgttccctttcagctgacttagccctactttcttttgatcttggttaacataagaaaaagagtccatcttccaattgagaggattttctattttggaaccacaggctgttaacatcatacaactaataagcagtaaaaaaaacaatttataagaccagcttttcatatgttcctcctgcacggttaaagtttagtcatagctagggaaaatcaaggtaaacgttgaaccttttcctggtatgctttccacttcaattcttccattcatttgttcgaccagttgataagacaccatcagaccaatccctgttcctttttcttttaaagaataaaatgctgttcccagccggttcacttgttcactggtcatgcctataccagtatcttcaatttgaatatgtacctgtccttctcgcttgtaaagccctactcgaagcgttcctccagctctcatggcttcaattccatttttcataatattaagcagaatttgattcaattcgtttcggctgccgcgaacatacatctcttcttttgcgtctaattctatgagtatattatttgttaacaaagcataagaagataataagtctactaagcttgtaatacactccaagcagttaataaaacgatgctgatgaacatccggcttggctaaagataaatagtcatgaataatcgcttccgctctgtccatttcgttaatcataagatgaatgtaacttaattcagtgtttgaaagctttgtgttatcttgaaaaagctgtaaaaacccttttaccaccgtcataggatttcgaatttcatgggctacagaagcagctaattgaccaattgcattcattttctctgctcgctgcaattccttttgcattctcgttttttccataataacttccaattcatcaatcgctttagcaattccatcttttgaatgattgaaattcgtttctacgttcagctgttcttttgttgctgacacttgttgaaaaagctgctgaagccgctcggtcatttcattaaatcttgtgtgtacattccctaactcagaatcatcttcgtatgtcagcttcacatcaaacttcccttgacttactgcttgaattccttctactaattctcctaggggcgacattaatcgccttagtccccagtcttgaataacaataatgaaggtaaacaaaatcgtaaacgcaacggccaaagccacaattaaacgtttttggtagatatagatagcgcttgcatctatatctacaccaagaatagccacgacttttccggagctgtttgtaataggcgataaaacggttatccacgtcccgaattcgtctttgtatgtagatgttacgatatttttcttttcttgttctgcttgcttaaatgatttgtaaaattcttctcctccataataaatcatggatggctctagtgattgcttaattttcttattcgctgttacgataatcttatttccatgcgactggaattttcggtcgtcataatatatccctgcaagtacgacggatgcaattcgtaaatctttctgaactgcttttctagctcgtctttttcaggaatcgtcccgttccttgaatccactgctgctattacgtcttgtttagataaagactccctccataaatcggccataattaacgcgtgctgcgttagtgtctcttttgccatctttttttgaacttgatagctaatggctaaagaaatgactccaagggcaactacaattaaagtagaaaataaaaccgttttgttaaacacactcaaatttcgaatatattttttcatcggtatactccggattcaaaagaatagtaaccagcacagcattcgctggtagaaagttgattctattatatcacacgttggtccacttctctttcctctttttccaaaaaagagaaagccaaaaaagtgacttgcaaaaagcaacccactttattcagcaaaatacataaaaccaattgcaccaatacctgtatgcgttgaaataataggcgtcgtatcttcaatcgaaaattgcgtatagccccttgccttcacaattgattcttttaacttagaggcgagtccaaatccatctgcatgtacaagccctactcctttaatactttttccttctgtatgctcttcgaactgtttcgttaaaaacttaacaatttgagaatggctgcgcactttagcaacaggagtatatactccgtcagctagagaagcaattggcttaatatttaaaagagaaccgatcaatccttttcctcgtccaatacgtccacctttaaccaaattttcaagtgtatcaactacgacaaaaagattcgtattttgacgcacctcttccaagcgcgtgataatttcttctactgtatgcccatcttcaatcattttcaccgcttcaaagacttgaaacgaaagagcttttgtaatgtacatagaatcaacaacggtgatgtttccttctaccatttgagccgcgctttcagctgctcgaacagttccgctcattcctccagtcatatgaatcgaaatgacgtcatacccttcactaactaatcgttcatatacttcaacaaaagaaccaatagctggctgagagctttttggtaattcttttgaatttttcattttttcaataaaatctgtcggcgttaattctacgcgatctaaatacgtttcattatcaatgttaatacataaaggtatcatctcaataccgtatttttcagcttcttccaacgttaaatcaattgttgaatccgttaccactttaattttcgccatgtgttcacccctataagatgcattgcagactagtataacatgaacacttacaacaatatagttataatagaatgcaagttttgctaattcgtaaaacgcatgttcaaccttttatattaacaaaaaaagttgactctgctgaaatattcagaaaagtcaacttttacgtttatgcattatgttttaatacatgagacttaaagagctgttcgtaatctttccatttcaacacgcgttttaaatattcttgaaacgagtaggtttgcttcggaactgattcgttcgtgatttgtctaataaataaatcaagttttgcagataacatgaaccgaaacgtgctattttcctctaaaactggaatttcagtaatttttactttttgaccactgacatgtttaaattcaaggctttttaatagcaaggcgatcaaccctctttttacccgtttattttattataatgcttcaggcactttctgtcttgataaaataaaaagaaaacacaaatattttttaaaataaaaatgcttcatcaacttattcgacagttgatgaagcattcctttttaaaacgaccttctatttaaataaataagtgaaacaagttgctttctttattaatttctgtgtaagggaatccttttttatccatacgattaatcagtggataataatcttctttatgcttaagctcaattcccacaagtgccggtccgctgtctttgttattctttttcgtatactcaaagcgcgaaatatcgtctgtcggtccaagcacttcgtctagaaactcacgaagagctcctgcgcgctgaggaaaattaacgataaaataatgctgtaatccttcataaatcattgaacgttctttgatttcttgcatacgtccaatgtcattgtttcctccgctgatgacgcaaacaaccgttttccctttaatttgctcacggtatgagtcaagagcagcaatcgaaagagctcctgctggttctgctacaatcgcattttcattgtatagagataaaatggttgtacaaaccttgccttcaggaacaactacaatatcgtccacaagttctttactgatgtcatacggaagcgttccaactgttttaacagctgctccgtctacaaatggatcgattgccggtagcgtcactacatttccatttgctaaagatgtctgcataccaggcgcgcctgctggttctaccccaatcacagctgtttgaggcgagatgctttttacgtatgtgccgacaccggaaattaatccgcccccgccgatacccgcaaatacgtagtcaatttcatcttcacagtcattgaacatttcaacggctactgtaccctgtcctgcaataacgtctacatcattaaatgggtgaataaatgttcgatgttcctcttcactgcatgcaatagcttgttcataagaatcatcaaacgtatctccgattagtacgacctttacgttatctttgcctaaaaatttcacttgattaattttttggcgcggcgttgtgctcggcataaagattttaccatcgatgtttaaatgacggcacgcatatgctacaccttgtgcgtggtttcctgcacttgcacaggcaattccattttctaattcttctggggataactttttgattcgattgtacgcaccgcgaattttaaatgagcgcaccacctgtaaatcctcacgttttaaatagatattacattcatatcgttcagacaaaacgtcattacgctgtagtggtgtatgcacaacaacatctttaatcaattgatttgcaatcatgatgtcctctaaatgtacgtgttttgttcgattatctacttgttgtttcataaccaacttccttcctcttctaccattattaatttgtacattatatcacaaaaaatttagaaaaatcattatttttcattaataataactaaaaaaacttttccaactattttactgtccacatactttacatatgtttagcaaacgctaaatagacttacaaaattgcccatactttctacatgcagctgatgcgataacaggtataaattaagaaaggttgtggaataaatggagttttcacttcaaagtcttgaaagtgccgttccgtgcgaaatagttgcagatgaagaaaacgatagatacatgcttcgcaaagcagatacgagcggagaaatttttaatacaccaagcgagctgattcaatggattgaagctaactggagccctgaacagtttgtgagcccagcggcttttcacgaaatgatgaagcaattaaaatcaatataaaaagagattgaaacataacgaaatcaatctaaagacgaataaatggagtatagaagctagctagtaaggggtgcttgttacaccgcatttgatttccatgcgagactttgctttccgcgggcggccggtgagcctccactcaactgctaaaagcacctacatacatgaaatctaccttcatccttataatgaaaagatccgaacgattcaacgttcggatctttcttcgactaacatactttgtcccagactcgcgttttttataaacaaaagagatcagcttcgctcgtatacggtaaaataatacgtgtagggatttttttcatctttaattccttgctgcttcgaaataactttccattcgctcagatcaatcgcaggaaaatgtgtatctccttcaaaggattcttcaatatgcgtaatataaagtcggtttgcaacgtctaatgtttgttcatacagagtagctccgccaatcacgaagagctcgtcttctttttcagcatctaatgcttctagttcctcaactgaatgaataacggttgctccttcttgctgataatctttttgacgcgtaagaaccacattttcgcgattaggaagcggtcgtccaattgattcaaatgtttttcttcccattacaatcgtatgactcgttgtgatgcgcttgaaatactttaaatcttccggaagacgccatggcaaatcattctctttaccgatcagcctgttttgatccattgcgacaatgagggaaatcatacgctcacagctcctttgatgtgaggatgcgcattatagtctactaactcaaagtcttcaaatttaaagtcaaaaattgattttacgtctggattgattttcatttttggcaaagcatgaggctcacgcgtcaactgcaggtttacttgttcaatgtgattgctgtaaatatgcgcatcgccaaacgtatgaacaaaatcacccggctctaaatcacacacttgtgccaccatcattgtaagtagcgcatatgaagcaatgttaaacggtacgcctaggaaaatatcagctgaacgctgatacaattgacaagacaatttgccgtccgctacgtaaaactgaaataagcagtgacacggcggtaaagccatattgtctacatcagacacattccaggcgcttaccattaagcggcgagaatcagggttgtttttaatttgattgataacattggtaatctgatcaattttttctccgtccggcgttggccatgaacgccactgatgcccatacacagggccaagctcgccgttttcatccgcccattcattccaaatgcgcacgccgttatcttgtaaatacttaacgtttgtatctccttgtaaaaaccaaagcagttcatgaataattgattttaaatgaagtttttttgtcgttaataccgggaaaccttcttgtaaattaaaacgcatttgatagccaaatgtgctaattgtacctgttcctgtccgatcttctttttttgttccatttgctaacacatgctcgcaaagttcaagatattgtttcacttccgacacttcctttattaaaaagtccttttctattgtataagtgttcacgagctaagtaaacaactaaatctcagctcatgcagaaaagttttttatcatttagatacgcaattccccctaaaaaaacgagaatgagacctaacaaaatcaattaaataatcgagtatgaatcgcttatgacaccgcggttgctctccgtgcaaggctttgctttccgcgggcggctgatgagcctactcgtcgcttacacttgggggatctcatctgttccgctttccccgcaggagtcttcgccttgccctccaatcaaccgctagaagcaactaaatagattaaatctacgttcactatcaaaataaaaagatccgaacgagttagattctctgccaagaatctcgattcatcgttcggatcttccttcggctaaactacttttttaacagcttagtctttgttaattaaatacaattgtgcggttttcatgcactaaaatgcggtcttctaaatgccattttacagcacgtgcgagcaccgtgcgttcaattaagcggccttttttctttaagtcatccgcatcatcacggtggttcacgcgttcaatatcttgttcaataattggtccttcatccaagtcgtctgttacatagtgagacgtagcaccaattaactttacacctcgttgatatgcgcgttcatatggacgtgctccaatgaatgccggtaagaatgaatggtgaatattaatgatacgatacggattttcagccacaaaagtcggcgttaaaatttgcatataacgcgccaagataatcacgtcaatattataatcttttaatacctgcagctgtttggcttctgcttcttggcgaatgtcttttgtcgcaggtatatgcttaaacggtataccgaatgattcaaccacttcgcgcgcatcttcgtgattgctcacaacgacagcaatgtctgtcatcaaatctccgctttcccatgcccacagcagctctagcagacaatgaggctcttttgacacaaaaatagctgtttttttcaaattatgagcatatgtaaactgccagttcattgaaaatgtattggcaatttttttgaaactttcttctagttttgcttctttagctaataaatcctcacattcaaattcgaaacggataaaaaacatccccccttcgtggttcgttgaatgttgacttgattctacaatatttgcaccgtgctcatgtaaaaacgtagatactgccgatacaatacccggtttgtccggacagctaattagcagccgaccgcgatttttatatttctctttatatgaagttaaatgtttttgaatatgcgatttcatgtaattccctctctttttttaaatatacagacaattgtaccattatccttgtagcgatgcgacattgaaatagtgctttgacaaaagaaagctgaaacgtttgcttcagcttgtgtacttgttgttttaacatccactcccattaaatcgttcattcactcacctttacgttctacacatacctaaaatgagtgtttcctaaagtgctacagctcatccccttcgcttcctgcttttgaattaaccataaaaaagccgctggcacaacaccagcggcttttccttattattgaacagctttttcactaacttcatgcaaggcattccgtacctttccatattcacttgcgtgaggacgatctccgtcgtcttcgtatccgtaatcaaacattcgatttcgatttaacgttaacttagtaatagttggacgcaataaatcaaataattcaaatcttttctgtaaatgtggaaatgatgcctgataatgtaaaatttctgctcgtacacttttccaaaagtcctcttcttctacaccttcatgctcttctaaaatagtcgctaaatagcggaagtgacaaataaataaccctgttaaaataaactgcgtcaatccttctggctcttcgctgcgcagcacttcttttaattcaaaagataactgctgcagttcttcaaacggctgatcactaatattcacgtcgtctacaaaatctttcataataattcgaaccggcttgttatttttgagaaccagtaccgtattttgcccgtggggggagaatacagttccgtattgatacaagtagtgaagtagcggcggcaaaacagcgctggttagcgcatcaatccactcgttaggagtcaggcccgacctttttatatatgacgaaactaaagcttgtccttcactgtcaacatgtaataacgcagctagcgtaatcgcacgctcgccttcttctaactcttgataaatgctttcacgccaaacgactccaagcatttctaaatactgataaggtgcgtttttaatagaagcaaacgttggctgagatacgtttaacgtagccacttcgcctaaaagccctactttgcacgtatcttttaaaaacgtgtcgcgatctcttatgccttttatatgctgagtgacttgaggagcaattaccgtccgctcacttggaaggcctctgtacacaagcgtatttaatatactcatgggaagcttcacgtgatacttatctcgatttgttgtattcacaaatgtccgaatcgactgctgaggcaagtattgatcttcaccttctcctaacggaacaattaaatcatttgcaatgtattcagcgaataaaggaacaatcacgttcatccactgccattcatggacgggaatatagtaatagtccgctgctaaaaggtcttggcttgttaattctttttcaaattcagctagcgtctcaccgcttatctcctgtttcataacatcatcaaagccgagggtatctaatgaatgaaaagaagcaatttgcttcgctacagcaatccatgaaagctgaattttttgtttttgctcgggcgcaaaccgaagatagtcatcatagccaaacccaatgcgccctttattatacgtaatccaaggatgtcccgtcatttcaccttctagctctgcataatccatatctgctaattcatccgctgattttcgattttgcaaatgcaaatctgctactagtgtatgaaaatattcttttgctaagtgacctgcagttgagctagacattcctttgtcttcagataagctaattaacagctgcagcgcttctgaaaatgtaggggttgacgctttagatgtcagcttaatactttctggcagtacagaaaaactgtcaaacaatcgctgtttcgcttgatatgtatacgtgacgcctcggtggtcttcccatcgatacgtggcaagcgcaccctgcttttgcagctgttttggctcaataatattttcatacatgaattcccgcagcattttagctaaaagctggcgatttgctttttcccatgattgcttattaaatacggaaagattcgtttctttgattttcatccttcattctcctcgtatattatatttaagccctatttaggagctaagatctgtttccatattaattaataaactaaataacatattacttggatgtctcaagatatttctagataatgatcataggatcattttttcaaataatttccagtaaataacattcgttactggtctagtttcgtgatgctttttttaagtaaattgccctttgataactttacgttctttcatttttcagttgacatactaccgcaggtctttacttgtcttagaatagggattgttttattacgcaacggcattacagcgctagcagctagcaaagcagcggcaccaactgctaaaggaagcgctaaatttactttgctgatttctagtgctaaaagcggtgcaatcagcagggcaatattttgaacagcaataagccagctgtaatagtaagcagctccttctttgcttttttgaaataagtagatatcaagtataaccatgctgagataaaacccggctccatataaaattcgacttataataaacatgctgagatgatcggcatatgcttgcaaacatagcagtaaagcactagcacccgttacgctataaaaaagcagtataacttttccattaaatagctttgtaggtaccgcaagctttaagacgatcgccataatactcggcatcacatataacaaagcgctgccttgactgctcatgccatatgtgccacttgtaaacaatgtaaaataagggcgaatgacattgtgtccaaggtgaaaaaagaaaatagccagcaaatagaaaaaaataggctcgtttatactttgagtgtatgctggtgttttttctttttttaaagatgaagcttttcttgttacgagccatacggccagtaccatatcagttaaagcaaagtattgatatactttaagcggcatttcccatgcaataatcgcacttccaaacaagctagcgacaataatagccgtatgaacaataaatacataggttgttgcagcacctgcctttttctgtccatttttcatgccgcctactaaataggggtataaaagatataaactgctttgaaacacaagtaatactaacgaagtggctaaaaacccataaaaagtagaaacttcactcagaatgactttaactaaggctgtcattagaagtgacgctacgattatatgttttactttccacttcttaagcagcattccccataaaggagtcataacaatgaccacaatccggcagcaaataataaaaaaagacgtcattgcaactccatccacatggaaagcacttgtaaaatactgcggataaaatggtgataataacacttccgacgtcatggtcataaataaacagataaaaacaaagcgcggagaaatcatctcttaaaacccaaacttttggaaaacagtatttttatatattttatacacgtttttacctgcaatttgattaatcaagacagcattgcgataagcgcctaaacctaagtctggtgctccaaccccgtgtgtatgaagttctcggttttgaacgaatagcggggcgccttttttcttcatctcaacttgatagagttcgttaattttcagctgtcctttttcatcaaacagcaaatgttcttttaaaccttccataaaagaaggctcttttgcatgatagcccgtggccataatgacaatttcactttcttctttttcaaacgagtcctgctcgtattggtgaagagtaagaagatgtgtatcgtttgtcttttcaacgcctgcaagttccgtaagcgcgcgcatcgttagcggcacttcttttcctccaattgttcgttcgtaaatcaaatcataaatatcaccgatcgtttcaaagcttattcctttgtataaaagagcttgatttcgtaaaacgctctcttttttctcttggggcaatctgtaaaaatagcgggtataatcaggcgaaaaatgttcaaggccaagctttgaatattccatcggataaaacccttttgagcgcgtataccaattcagcttatagtcaaactgaggctgctgttgaagtaagtcatagacaatttcagctgcgctttgaccagagccaattacggtaatacttttagccttcagcgtttgttcacgattcattttgtactgagcggagtgatagaacgtatcgctggctactgattgaaagtctcttggcactacgggctgtgtacctactccggttacaagatgatagctgtaataggtatgaagctttccttctttttcaaccgttacttcataaaaaggtttagcgtcttcatgcatttttacttcttttactgtgctgttaaattcaagcccactcagctggctcgctacccagcggcaataatgattgtattcatttctcggaatgtgaaacttctcaaagaaataaaactgatacaagcgctcatgctcatgcaaataatttaagaacgtgtacggactcttcggatccaccatcgtgaccacgtctgccataaacggaacttgaagagttgtcccttctaaaagcattcctggatgccaattaaactcctttttttgttcaaaacatttatatgtacaatctgttttatcaattaaagctgctaatcctaaattaaatggaccaactcctactccaattacgtctaaaatgtcccgttgttccattcgctccaccttctttcaaatactgttctttcacatttcagcagtacgcctgttttatcaggcagcgacacttctttcataaattgaaacccgcattttttaaatactgcaatcatcttttcatttcgtatatctggttccgctattactttagcagtatctgctacctcgaacttgtgctttagtaaactaagaaggagcggataaatatagccttttcctaaaaaagcagggtctccaattaataaatgaatcccttggtctcctttttcataagggtaatagttactgataatatcgccgtcaaccgtataagattcccaatagctcataggcacaccgtcaatttctccaattagcagtttttgatgggaatcagctagaaatgtttttaaatgctgctcatacgcctgttttgaaatatttaaattccaatacggaataacatgcggttcatgcatccacttgtacagccgttcgaaatcttttgcaaaagaaacagagcgaaaggtgatgctctgctccttttgctgcatcataaatggatactgcgtttgtaatgccgatttcatacccgtacacctgcagattcgtacagaggattttcaacatttacataaacagactgcgtttcaagagagcctaccagctcatccatatcatgaacgcgcgttaagaaattggctttgcaaggaagcactttctcttctaacatcgatgaaacaagccccgtatgatctttttctttgtacctctctatttcttgtcgcagaatcaatagcagatctgactcttgaacgaggccagctgcaccaaaagcattaactaatcctaaaatatgattaaaaaatacgtaataacgaaatctttcttctgctacagcatcatcacataccgtatcgctttctccgtttaaggaaggaagcagcttgcgaagctcttgttcctttgatttcataaagtaatagccttggttgtcacggtagtaaaacaccgatggatatccgttttcatcaagtttaataacggaattttgctgatgagcttccagcgcaattcctttttgagtgtaaagccacatcataggatgaaaagagacatctaaatagcgtttaaaccagcgcttgcttatgtcttcattcgtactattttcacttgaaacaatatgattaataatattttcaatttgagaagctttcccaaacacatgatcttgacacaaacttgctaggagtgttgtacggttcccttgctcaccttgaaaagggttgcttcgaatcatgacttcaaacccaaactccttttttccgatcgtgatgtaagcaggatcttcaatcacttgaaaagccggatgattttcttgaagctccgcctgtaatccttcttgcaataaacgactcacttctacacctctgcttaattctttgcgtttattcactctcagtgaattcgtaatcttcaccggaatagaaaatttgtacatcacatctgcatcttcactgtatacggttcgaacagacgaagtcggataaaacggctgaccgtgtggccctagataagcaagccggcctttttgaatccattcacacacttcttcttttcctaaaagataacgagcttgcagcggatgcataggtataagtgaataatcatccgcttggcaatacgactgtatgaattcttcagaaaccttcttatcttttttcaactgctctttaataagctgtgaagcggtttgactctcggcggactgttctgcaacaagcgatttatgtgctctaaaataatgaagctgaaatttgccgttcacttcaggcccaaacacctcttcttcttcaggtaatatcccttgacggcttttaggtgtcggatgcagctggtggccaataagcaatgactgctcagattctaagaacgttttgtcccatttatagcacgtttctaactctttctgtcttttttcaatgaacaatttcatattttcgtagcttaatagcacacgtacaatcagctcattcacctgtagtaaatgatctgttacttcttttaaaagaaaggctaaaagagtgacgacatctaactccttgagctcctctttctgaatgcgataataaaagaccggaaagaacaagtgacgtccggtagctgaacggtactttactggaaagtaaagagttaccggctgtttttctagcctaagaacgagcgtttcttcgcttttcatttctgaaacggactgccatactcccttacctgtttctcgaatatagcaattaataatattttgcattgtaataaaattagccgataactgtgcgttcacgtaatcgctcctcctttttctccaactcttttcctaaagccacgacttcctctaactgagtggcaacagaatcaactgtaatcataggatttaacatcgttagctttaaataagcttgctctttatgctttgtttttgccatgataaaagtgcctttttcatataaatgctgctgaatacgctgatttaacttattttcatagtgctgctgtttttgacaatcactatataaagtatctggcacatagcgaaatacaaccgcgttcatataaggatcatttaacaccgtaatattcctctgctttcgtaaatgttcagctgtctgcttagccgtttcaatcgtatgatcaaccatttttccatactcatttgtacctactgcacggaaagtcagccatagcttcaaggcgtcaaatcgtttggtcgtttgaatactgcgatctaccaaatgtacatgctcatcttcttcaggatttaaataatctgcatgaagctgaatgtgtttgaacatagctgaattcttcactagaaatgccccgcagcttaccggctgataaaaccacttatgaaaatccatcgtaatagaatctgcccgttcaagagcttttaagcgttcacgatatttatgtgaaaatagcagcgctcctccataagcggcgtcagcatgaagccaaagtccttcttttttagctagcttactcatttcaaaaagaggatctacgcttccaaaatccgtcgtgcctgccgttgctacaacagcaaagggaaggtttccctctgctttaacttcccgtattgcttcttctaaattttctatatccatctcgtgcctttcattgcactttacactcaccactgcattcatgcccagcccaagctgagctgcagattgctgcaccgtaaagtgggctttttcggagcagaaaatccgcagttttttagcttggagcggtaaaccttcttcactaacatcaattgaaaatgcagcatgacaatattcattacgagcaagcagaaggcccatataattcgactgagtccctccgcttgtaaaaacgccggaagaagagcttggataaccaatttgttgtgttaactcatcaatcacttgatcttctatatacgtagctgccggactttgatcccacgagtccatagattgattcaaagcagaaatcatcacttccgcagcaagggccggtataatcggaggacaatgcaagtgtgccattgccccgggatgcgaaacatgaagcgaatgatccatcactacggcttgtacgtcatcaaacagatcttctagcggctgttcgtgttcgctaaaatagaccgcacgattgactaagttcgatagttcgtcaacgtctatgtgagtataaggggattttagtgtatggtagtgacgtttaatcatctctgtcattccgcccatcatggcttcataattctcgaggctttctttggatgatgataaaaaccacttttcaaacggcgccattttatttattcacccacttctcttctgctgcttttatcgcttcttcaaatcttgtcaacacttcgtcggtttgttgtttcgttaaaattaatggaggaagcagacgaataacagcaccatgtcttccacccacttctaaaatgacgcctctgtcgaaacattctttttgaatcagcttagctaactcaccgtttgcaggatgactgccgattttattagccggctttgttgcgtctatgatttcaacgcccagcatcaaacctcttccgcgtacatcaccaattgagaatacttgcttttgaatatgttttagctgactctgaatataagctcctaattcatgagcatgtgcaggtaagttttcttgttttataaattgcagagtggcttgtcctgtagccatcgcaagctgatttcctctaaaggtgccgatatgtgcacccgcttcccattgatccagctttttatcatatagaacgactgataaaggaaggctgcctccaattgctttagatagcactaatacatccggttgaatatcagcgtgctcgaatgcatacagctttcctgttcgtccaattccagtttgaacttcatcgacaataagcggaatgtttcgttcttttgtgattctgcgaagctcttttaaccatggaatcggcgccggaacagagcctccttctccttgcacaatttctactacaacacccgccggagtaacaattccgctttcaggatcatccagcatattttcaatgtatgtactaatgtaagtgtgaccttcagcacctacgccaaacgggcagcggtattcatatggataaggtagaaaatgtgtatcgggcactagcgcatgaatgtgctttttgggactcgttgtaccgctgatgcttaacgttccgtgcgtggagccgtgatatcccccttgaaaagataaaatcgttcggttgccggttgctgtttttacaagcttcaaagccgcttcaattgcgtctcctccagttggaccgcaaaactgtattttcgctttgtttgcaaattgttctggcaaactagcaaatacttcatcgataaaagcttctttcacaggcgttgttaaatctaatgtatgtaaaggaatagattttgctaaaacgtcttgtattgcttcatggactacgtaatggttatgaccaagagcaagcgtgccggctcctgctaaacaatcaatatactcttttccatccatatccgtgattacggcgccttttgcttgtttaattgcaataggaaggcgtctaggataagaccttgcattggattcacgttcattttgcatagcaagcagcatttcgtttgatgtaagttgtttcgttgacgttgacatatcatatcctcctgtttattcaattgataatgattttcattaacaattacaacaataaatgataatgattatcactgtcaatgattattctgaaaatatgaaattattcctatttcactctaaagtcgaaaaaacacagcatttctcttatgtatcaaggattcacagggttttatgatgttttccatttagggaaaaccatgtaataagtccctttctgtttccaaataaaaaagtgctacaattccttgtagcacttctgttacttttgcttattcatcgtttcttttgcagcttttacactccttgggtcaagcggtttcgtatattgacaattcactcgaacccctgaaccgatacgaatttctttcacgggagtaacggataagaacgcttgaagattttcaggtttcagcccttttgtcccgattaaaataatatctttatctttcattcttcttaacagttttttaatatgaggaataccgtttagtgcacttttatccgctcctgaagtcatgacacgctgaatttgcttatagcttaaaagcgtttcaagcgccttttcttgatcactgatttcatcaaatgctaagtggaacgttacgttcatttctcctgccgcatccagcagtcgctttaaagcttgctcatcgataattttgtcctctgttaaacagccaatttcaattccatcaatgccaatttctcttgcatagtgaatatcttcaatcattgtttgcaaatcgtcttcatcatattgaaaagattgattatgtggacgaatcatcacaaatattgggatatgtatcgtttctttcacttttttcatcaaaccgtagcttggggttaagccgccttctccgattccagttacaagacttatacgatcggcaccatgttcctgggcaactttagcatcatgtaaggttgcagctgtgacttctaatatcattctaaaaacaccctttcccctttaatatagagcttttgccttcttttccctgtatttatacttaaaaaactctaccaaactctcttatgtaagaaaacacccaaaagatgtgattaatatttgcaaaaaattgaatgtcatggaaaaagagtaagaactattctttttctcatgacgtttcaattaataaaattctatatttatactaaagatccaaaaatacatcccttttatctagggtaaaggatttattaaaaagagcgtggatttgtttgttgcatgaacatccactcatttaaagaatgaggctgctgatgaccaacgggtgctgagaaatcgcgacatccgcaatcatgcatcggcatttgacccattcctccttgcattggcggcattcctccttgcatcggcatttgacccatccctccgtacattggcggcattcctccttgcattggcggcattcctccttgcatcggcatttgacccatccctccgtgcattggcggcattcctcctccttgcatcggcatttgacccatccctccgtgcattggcggcattcctccttgcatcggcatttgacccatccctccgtgcattggcagcattcctccttgcatcggcatctggtccattcctccgtgcattggcggcattcctccttgcatcggcatctggtccattcctccgtgcattggcggtagctctccgtacattggcatttgagccatatctttttgcatcggtggcatttcgccttgcatcggcatttgattcattcctccatgcatcggcggcattacatctttcatcggcggcatttctccgtacattggcatttgttttgtgccttcttgcaccggcattgcctgcatttcttttgcagaaggcataggcggcattttagcaggtttaggtgctgcttgcatatatggattggatatcggttgtccggtttgtttcattccatacgaatttctcatttttaagggctccttcccattctcttactctgtttacgttattctttttaccatcaatctgaaattcgtccataagaaaataggccttctacacattcaaaattgtagaacgtataagaaaaaagctataatcgaggcaaattgcagatagaaaggtggcacatgatgaataaaaccattatcgtatggattcgaaaagattttcggctggttgataacccatctctatttcacgcagctaaagaaggaatggttgtacctgtttatatccatgatgactatgaagaaagctcaatgggaagtgcaagtaaatggtggcttcaccatgcgctgaatgactttaaaaactcgatcgaaaaaatacaaggaacgctgattgtacaaaaaggaaaccctaaagatgtgttacaaaaactactccatgaaacgaatgcccaagatatttattggaatagacgctatgaaccacatgtgctaaaaagagataaagagcttcaagcttttttttcagagcaacaaataaatattcgcacatttgaggggtttctccttcatgaaccttggaaaatcacaaaagaaaatggagatccttataaagtgtttacagcttactataaagcttctcaaaaacattccgtatcttctgctgtaaaaaaagttacttccatacaggcttcctctaaacccgttgaatctctttcagtctcagatctcgatttgcttccaagcataccgtgggataaaacgattaagtcgacgtgggaagctacggaaaaaggcgctattgatgtgttcaaaacgtttttaaagaataagctgcttcattatgaaaaaggacgagattttcctgctgaagcattaaattcatgtctatctccttatttcgctgcaggacagctctcagctcgagttctttatcattatttgagaactaaagtagaaaaagtacgttctgatgcttttgaacagcaagctgaaatgtttattcgtcaacttatatggagagattttgcttatcagctgctttatcatttcccgcacactacaactgaaccgcttaatgaaaaattcaagcaatttcagtgggctgacggcaatgaagagcttcaagcttggaaaaatggaaaaaccggctatccccttgtcgatgccggaatgcgggagctgtgggaaacaggttttatgcacaatcgagttcgaatggtagctgcttcctttttagtaaagcaccttttaattcattggaaacacggagcaaattggttttttgataccttagtagacgcagatttagctaataacacaatgggctggcagtgggttgcaggctcgggagcagacgccgcgccatattttcgtatttttaatccaattactcaatcagaaaaatttgatagagaaggagaatatattaaaaagtggcttccagagcttaagcatattccttcttcttatattcataaaccttgggaggccccagcagacgtattagaaaaagcaaacgttacgcttaataaaacatatccgactccaattgtcgatcataaagcagctagagagcgagcgctagagcattatcagcctatcaaataagaggtaaatcacgcctcttatttgataggctgaattttttaaatgtttaaaaattccatttcgcatctatttgcaactaaaaacatgtatttgaaatctatttatagggttttcaagcccagtttccctctctatagcacatttgatttttcatattttttcctataatttgaatatataataatgattatatatgcttgagaactctctcattgcatagatctgattggagtgattcgatgcccgtttgtccttcttgtaactataaggaagactataatttttgcagaatgtgcggcactcaagttcggcacaccttcacgaaccaagaagatcagcttttttatccattaaaagatcgaatcatgacggatgacaatgaaccaaagcatcaagctattttatctcatacccatgatttagtatgtgctattactggagatggcatttatgaatacgcttctccttcttacgctaaaactttaggcgtttatcctgatgagcttattggacaacatgtgcttatcaatgcgtatcctgaagacaaacacctaatctcgactattttagctaacatgagcaaaacaaaagatgcctccacatttgaataccgaaagtttcacgtgaatggcaccatcgttttattagaatgtaaaggcgctccaattatcacatccactggagaaatcgaagggtttgtatttgtctcacgagacgtaacagaaaaaagacaagcagagaaaaagatccgaaattcagaaaaactttctgtcattggtcaccttgctgcaagtatcgcacacgaggttagaaatcctttgacaaccattaaagggtttatacaactgttcagtgagacacagcagccgaaaaaaacaatgatttatcgagatctcattcagcatgagctctcgcaaattgaacatattatcgcagaatttatgagtttagctaaacgagagtacgcatatacagaaagccttgttatgacagacttgctagatgaggtattaaagcaatttgaaccggttactggagtcaaaaatatccacatcattcgccattatccaaaagaacatcccctgctcattagtgggcaaaaaacacagctaacccaagcatttattcatattatacaaaatgccattgattcgatggaaagtggcggcaagctgactgtatcgattaaaaaagcagctagagaaacgctatgtattgtgataaaagatagcggatgtggaattgactcaaagcgtatctctcatataggagagcctttttatacaacaaaagaacgaggagtaggcctgggactaaccatttgtaacaaaattattaatgagcataatggtttttttcacgtatcaagcgaagaaaatgacggcacaagcattaccattaccctgcctatgaaaacgcctgaactttatgtggtagaagtgtaaaagaagccatctgagtaaatcagatggcttctttctttaaaacagctgggtgtacagctgatacttataaagcatataaaaacttcctatcactgccaggtaaaagatgagagtctctgctccaccacctgtttcatatgttaaaggaggcttaaacttcttcttgctaagaggagagaaaaaaggtacccctcgtttagaaaagaaatctccaagaatatgaaaagcgtatccataggctatccctaatgtaaaatcgttgttatacatcgtatgtaaataaaaaataagtccacttgcaagaatagaatgcgtaatacctcggtgtccaaaaatagatttaatgacttttgcgagaccaagagatcttctaccaatatatgaatttggttcatcaatatcaggaagcagcgctccaatcgcaatgcctacaacataaggaaatgtaaacgaagcgtctcctgttatagccacaccggcaccggcagcaatcgatgttgcaatatgtgtgtgatatctcaaatatgccaccttctttctttttcaacttaaggcaagcaccgtgaccaaaatcatacatatgttcgcccaacgttaactataagtgaaggtggtaaaaatgtcaaaataatctatagttacgtaaactgcagaccgactaacccgataagcatcacaagaaaactaataagagtaccctttccatttttctttgctcttccatcttttttgacaatggaataaatccacgtactcgaatacacggcgaatccaagaaaaccaaataacgtgatatatgtaaacatgccgaaactcctttgcttgtcattactattaactatacgagattttataaaaaaaaacaaagtagtatgacggcttgtttaatatctctttctttttcttatactaaaaagaggagggatggctatgcaccaaaagcagttggaagatatatttgacttttatggactgagcgaggtttatcgaggcaaatttgaagatgttgaacaccactggttatttaaagacgccgagccaactatactagaagatttttttaattctcacgattgcgaagaccttgaatgctgtactctagaagaattttgttttttattcatgaattttcaatcaatccatgcacaaattccccacgtgtactattactaaaaaagtgatttcgcaggaaagcgaaatcactttttattaaaagcctaaagaaatatattttacttccaaatattcttcaattccgtaatgtccgccttcacgtccaagtccactttctttaaagccgccaaacggcgcttgtggtgtagaaggtagtccatcatttaaccctacaataccatattctaaagcttcagcaatacgaatagcttctgaaatattttcagtgaacacataggctgctaatccgtaaggagagttatttgcacggcgaataacttcttcttctgtttgatacgtcgcaattggagcaattggtccgaatgtttcttcgtacatacaaagcatgtcgtccgttgcaccatctacaaccgtaggctcaacaaaaagcccgcttccctcttcgcgtacagcccctccagttaagacatttccaccctttgctacaacatcatctaagtggcgctttactttttctaacgctttttcatcgattaaaggtccgatatccgtaccttcttctaaaccgtttccgactttcagctgactaacagccgctgcaaactgctctgcgaacggtttagcaatagactcgtgcacgtagatgcggtttgtacatacgcatgtttgaccagcgttacggaatttagaagcaattgcatttgttactgctttgtctaaatcagcatttgctgttacgataaacggagcgtgtccgcctaactctaaagacacttttttaaccgtatcagctgctccgcgcattaacagtttacctacttctgtagagcccgtaaacgatagtttacgtacgcgtccatcttgaagccacgcttctccaatcgcttttgcatctcccgtaactacattaattacgccttttggaatacccgcttcttgtgcaagctctgctagtcgaagagccgttagtggcgtttgttctgcgggtttaataaccgctgtacatccagctgctaaagctggggctactttacgcgtaatcatagctgccgggaagttccaaggtgtaatagctgccatgactcccacaggctgcttatgagcaaataatcgtttattaggagaagaagctggaattgtttctccgtaaatgcgtttgccttcttctgcgtaccatgaaacaaatccgttggcatagccaatttcaccttttgcttctttaagaggcttaccttgctcaactgtcattatttcagcaagttcatccgtgtgttcttcgatcagctgatgccatttaaataataatttaccgcgctcttctgctgtttttttagaccatgtttgaaacgcttcataggcagcatctgctgctagctttgcttctttttctccaccttttgcaacagcagccactacttcatttgttgctggatttaccacttcatatgtatcatttgctgaaacaaattctccgttaatatataagtttgcttgcttcatatttcttcactccctgcttaaatttatctactcaatattctgtgctgtccgaaacgtactttcgaattttacgactggcttgcgattggctaataccaagctgttctgctactttgtaagacgacctatgctgttcaaacgccttgatgaccatttctttttccacatgttcaatcatttcaggaagcgtatgcacaggtgggtcgatagcaaactcttttgcaaatggcaagtctttaagcgtaatcatttcttctcctgtaacaaccaggcgctcaatgatattttccacttcgcgaacgtttcctttccattcctgtcctaaaaatgcatctaatgcctttggtgataagcgtacattacgttcatataccgtattaaaatgatgaagaaactgatagacaagaggcagaatatcttcttttcgctctcgtaaaggtggaatcgtaattggcaccacgttaagtcgatagtacaaatcacgtctaaactttccttcttcgaccatttgttctagattttgattcgtagcagcaataattcgtacgtctattgatactgctcttgttgaacccacgggacgaattgtacggtcttgcagcacatggagcaacttactttgtgctgaaagagaaagttcaccaatctcatctagaaaaagcgtgccttcgttcgaaagctcaatgatcccttttttcccttctcgaaatgctccagtgaacgtaccgccttcatagccaaatagctctgattcaataagctgttcaggaagcgctgcacaattaagctcatgatacggctgctgttttcttgtactaagctggtgaagcagttttgccactctgctttttcctacccctgtttctccaagtaaaagaacggttgtatttacagaagcaactcgttgaatggttgaaaaaacttttttcatcgcttcactttttgtcacgatgccttctaaatccacggcttcgtttaactcttttttatagttttcaagctgttcttccatctcttctacttttcgttttaattccattaagtctgtgagatcccgagaatagctaataacgctttttaaatgcccgtcgtttgtaaataccggccttgtccgcacatgaagataccggccggagtttgttttttgaaccaattcaattgcttgattagattcaatcacttttagcgtggccgaaggataaaaaatccccatttcctgcagttcttttacgtgctttccaataaaatcttccactttcaaagcatagtttttttcacactctgaatttacaactaacacatatccatttgcatcagttacaaagatttcatcaaatgatgactcaaatatatcgtaaagttcgtcgttaatttgctgaatatgctttttatgaatggtcatttgaatcaccttttcgtcaaaaaataattattattttattttatcagaaaatgaaaaatctataaatagagtgtccaaacatacctattctttgcgattcatgaagaatgagtgaagagttctctcttcactcatgtctcaatttcacttacacttcaaccgtttgctgtacgcttgcttctagtgctgcttcaaaaatagctaagccttcttccagctgctcatctgtaataacaatcggcattaagatacgaagaacgtttccaaatactcctgcgctaagcagtaataatccacgtttgtttgcttcttttacgatacgctgtgtgagctctttgtctgcttcttttgtttcacggtctttcacaagctcaatcgcagacattgctcctaatccgcggatatcaccgatacagtcatatttttctgctagtttttcaaatcgtgatgttaccacttttccaaggtactcaccgcgttcgtttagcttttcttcttcaatgatatcaagtacagctaaagctgcttcacatccaagaggacttccgcaatacgttccgccaagctcaccaggattagattcatccatgatttcagcacggccaatgacaccgctgattggtacgccagctcctaatgattttgataccgtaattaaatcaggctcaacgtcaaaatgttcaataccgaagtagcggcctgtacgtgcaaatcctgcttgaatttcatctgatacaaataaaattccgtgctctttacataattgatacacttcttgcacaaagcgtttacctggaacaatgaaaccaccttcgccttgaatcggctccattacaacagctgcaatcgtttccggtgctacttctgtatttaagaagtttttgaattctgtaatcatgaaatcttcgtatgcttcaactgataacccttgtggacggcgatactcataaggatatggagctttgtatacttcaggagcaaacggtccaaattcatatttatatggttttactttacttgtcattgtcattgtcattaatgtacggccatggaaaccgcggttaaaggaaataattccttggcgctttgtatatttacgagcaattttcactgcgttttctacagcttctgctccgctatttaaaagtaatactttcttgtcaaattcacccggtgcaattgctgctaatctttctgcaagctctacgtatgactcatacatcattacgttaaatcccgtgtgaataaaacggtctacttgtttgtgaagcgcttcttttacttttggatgactgtgccctacattgattgtgccaattgcgcctacgaaatcaataaacgtattgccatcgacatctttaacgatcgccccttcagccgtatcagcaaatgtcggaatgccataacttacacctttcggaatggcacggtgtcttctatctaataattgctttgcattttctcccggtaaatttgttgctactttgctaaaagtttgactcattttttatcttcctctcatattaaataattcttcaattagtttatatgcaaaaaacgtgccaacttttaaaaagctgaaaaataagcatttttagataattctaacgatattttactcatcaataagtctatataaacttattgatgagtcaataaagactttcctctcgcataaagtacaggaattttatattgccataaaaggaacaaggcttttataataaatgtataaatatagtaatgttaggattgacctctttataaaggagtgaaaaatatgctagagggctggtttttatgggttattttattttgggtggtctttttaatgagcatgtttgctatcggcggattttttatgttcaggaaatttttaaagcgcttaccaaaagaagacggcatgtctgagcttgattggcaagatcactatctttccaaaaccgtccacctttggtcagcggatcaaaagcagctattaaacgttcttgttgaaccagtacctgaactatttcgcgatgtagccaaacaaaaaatcgcgggaaaaattggggaactcgcaattgaggaacaagcagcctctataacggaagacttaatcgtacgtggatacattttagctacgcctaaacgtgatcataaatttttattaaaaacattaaaaaagcaaaaaatagatgccgtcccttatcagcatttattttaaactaaaaaaggtggctgcgcagccaccttttttagtttaatatcgttgtattcccaagacgatcattatgcagctttcgttcgagctttttgtacgatgtgtacatagcaatgcgccacggtacaatcataccaaatgctaaaatccagaacataccgccaagctggccaacatcaattgaagaacttaaatatattttcattgcaattcgaataataagcaaaccaataataatgaatgcaaaagcttttgaacgcttcaagtaaatatgatcgtcacgaatttcaaatttagacgttttaattaacaggattgagaaaatcatgcctgctattaacgcctcaagcagttctgcacccgttactcgaaacattggaaagataaacattaatgctcccgtactcataaaaaaaggcggaagtataattttttttgcattcgttggtttatcagcagctttcattcgaataactaatatgaaagaagccataaaaattgcgacaagtgttgaagcaataaccaatgaaatccttcctttactatagtttagtgtttgcttatattataatccaaaaaacatcagaagtaaaagtgcaacaaaaaaacaaaagagtgtctcttctgtttttatttagtagaggtaagatccgcttttgctttttgcttttgtttttgctttttcattgattttagtaagaacccgcctttaaatttacgcggctcgtacgaaataatgaaagcacgaggctcatattcttcaatgaatgctaatagctcttcttctctacttctttttgttaaaatgtccaatctatagcgtgcactgtctcttccttctccttggtaaacagtaacaccaaaaccttcctgtcgaaggcggttaattaactcttcatttttggtcataaggttaactaagaatgttgtatatccgatagcaagtctagattcgatataacttccaagaataattcccactccaaacccaactgcatatacaaccatagcaagcgtgctttgatctcctgaaaatacaagagataagccgaatacataaattaacgcttcaacaaatccaaaaaccgaggcatacatactcatacctttgactaaaaaaattgtgcgcagcgtcaagatcggtacatagatcagttgcaaaagcaagattaacaaaatatctttcaatttatacacctctttttaacaattaaaaatatgacgatttcattgtatcactccgtatttatagaagatatagtaaaaaaatttttttctatatattttttacatcatattcttgtatatttcctaagagcaaaagtaactattttatcttttgaaaaataaaaagaatctgccaattatcagattcttttttttatcatcttccctttttaaaagcccgtaaaccctccaaatacgctcgttgtataaataataatttttgtcatccagtcaaaatacaaaataaatcccataccgatcattgcatatccgccaactttcatcatagaattcatatgtttttttaaccagttcattttcccgataaaaaacgtcataataaaaaatggaatagaaaacccaagtgaataagctatcatatacaaaagaccggagcctgggtttgtcgctgcaagggccataactgatactaaaatagggcccgtacacggagtccagccggcagcaaaagccataccaataaaagaagaacctaagagtccagccggcttatttgcgaatttaagcttgtgttcctgcataagaattcgaggcttaaaaattcctagtacaactagaccaaagaaaataataagaatagcgccaatctgccgaattaaatccttatagttaaaaaaccactgaccaataaaagaagtagcaaagccaatcataatgaaaataacagaaaaccccaatagaaaaaatgctgtgtgaataaaagctttgcgctgatgtgacttagcgccttcctttagctcgctaactgacactcccgttatgtacgataaaaaagctgggtacaaaggcaaacagcagggtgaaataaacgataaaaaccccgcgccaaatgccaaaaacaaatttaaatctcccacatttcccacttcccttttttgttctttttgttctttttcgttaccattttgtaaccaaattgtcttatctcacttctttcaaatagtaccattatcttgtataattaggtaaacgacttgttagaagggatacatagcattggccaaaaaagatattctattagcgattgaaaagaaacgagaagaactcatccgcatagtccgagtaagtggattaaactctccacctgctattaaacatagtcaagaattagatcatttattaaacgtttacaatgaattccctgctcaaacaacagaaacaacctcttcatgaaggttgtttcttttttttaccttcactctatcaattctgtataaatctcttttactcctgtttctttgctgaaattctcttctttttcactgtgctgaagctgatacatattatagtacaaaccgcctttgtttagcagttcagtatgtgtgcctttttcgacgatttttcctttatgcagtactaaaatacagtcggcgtgttgaatagtggataaacgatgggcaatcgcaattgttgtacggccttttcccatatctcttaacacttcttgaatcgcttcttctgtttgtgtatcaatgtgtgctgttgcttcatcaagaataaggattttaggattccggatgaccgttcttgcaaatgctaagagctgacgctggccgcttgataaagtggaacctctttcgactagcacttcattatacttatttggaagggcttcgataaatgcatgagcttgcacaaattccgccgctgcttttacttgttcatcagaaaaatggtcttcgtgcagcgtaatatttcgtttcacggtatctgcaaataaaaaggcatcttgaagcactagccctacctcatctcgaagctgtttatttgaaaaagacgatagcggtttattatcgatcaaaatgtctcctttttgctgctcataaaaacgcattaataaattaatgatggagcttttcccgcttcccgtatggcctactaaagccactgtttctccttcgtttaccgtaaacgatatatcagaaagtacatctcgaacaccatcataggaaaacgttacgtttctgaattctaccgttcctttttgtaccccctgcttttgttctcctgtcatgactggatttttttctttttcatccatcaagtcaaatacccgagaggctgataccatcgcttgctgatacatagagagacgctgcatcatttcattaacaggctcaaaaaaacgatccaagtagttgataaacgcgtaaagaacaccaattttaacaggactgtcagctacggaaataccaaaataactgagcacaagaataacggccaaaatgtaaagaatttcgactgccggccttagcagcaaaccatctaacttaatattgcgcatccccgctttgtaatgttcatcattgatttcttcaaattccgagcgcagccgcttttcttgacgaaatagctgaataatagacatgccttgcaaagactcatgaagcttggcatttaactggcttagtttctctcgaagctgtccgtagtaaatagcgctgtaatgctgataaagcttcataagtccccaaatgaacgggagaagaactaaacaataaaaagccagcttcatatctagcataaacatggctataaaaataccgaccaaaaataccccattttgaataaaaaccgcgatgacttctacaaacatttctttcatggcttccgtgtcatttgtaattcgagataccaggcttcccgtgggcgtgttgtcaaaaaagcgaagagccaagcgatgaacatgagaaaaaacgtcaattcgaatctgctgaataatttgaagcgcaattttttggaactgcagaagctgaaagtattgaacgacaatttttaaaagctgtaaaagcaaataactgctagccagccacacaagaggctgaagaggcaaatacttaggagttaaataatcgtcaatgaaaattttaatcaaaatgggccctaataaatccgcagccgtagcaattaataatagtgtgaacgctaaaaaaaatgattttttatgcggaattgtatagcgaaacagacgtttatgtaccgaagaatgctcaattttcatttttcgtctctccttcttctaccgcacgttcaagctgctgtctatcgtacatatcctggtaccagccgctcacgctaagcagttcctcatgagttcctcgctgaataattttccctttatcaaatacaagaatcaggtctgcatgagtaaccgagctcagccgatgcgctgtaataatcgttgttcgattttgacgtttctgcttcagcgcttgtaaaatacccgcttccgtttttccatctaccgctgatagcgagtcgtctaaaattaaaagctcaggatctaatagaagagctcttgcaatcgagatacgctgtttttgtccacctgataatgaaacgcctttttcgcctactattgtttgatagccatctgtaaaatcgagaatgtctctatgtacattggcaaccttagccgcttctttaatctcttgattgcttgcttctctttttccaaaagcgatattatcagcaactgttgttgaaaacaaaaagtgatcttgaggaacatatccaatgcttttgtacaatgaatcaaaagcatagtctttaatgtcttttcctccccataaaacagctccgtctcttacatcaaattcacgaagcagcagctttaaaatcgtggttttcccagcacccgtctttccgacaatccctaacgtttgaccgcgagaaagtgtaaaataaatttcgtttaacgtatatgcgtcttctttaccatacgaaaacctatgaataacagcttcaatatttcctgttggcatttcaacgctaggatgcgctgcttcttcaatcgaattttcttcttttaataaagaaaataccctatcatatgatgctcttccacgttctacaatgttaaatagccagccaaacgcgagcatcggccaaataagaaggcccaaataagttgtaaaggtaacaagctgacccagtgttaactcttcactaataaccatcttgctgccaaaaataagagcaagtaaaaaagaaagtgctacaataatcgaaatggtcggatcaaacaatgcatctactcgggctactttcatgttcttttgcacaacatctgcagacttaatgcgaaattcttcgacatcagctgcttcttccccaaacgtcttaatgactttaattccgctaatgctttcttgaaccttatcatttaaagtagaaaatgctgcttgtgcgtgatgaaaccgcgcatgaagcaatgtaccatagtaacttgttaaaacggccataagcggcataggaataaggcaaataagcgttaatttccagctgattgtgagggccattgtgcatagaacaagccctcctgtgacaatggaatccacgagtgtcaaaacgcccgaacctgcagtttgttgaatagcttgaatatcgtttgttgcatgagccatcagatccccaattcgccgccgttgataaaaggcctgattcatcttggtaaaatgagtgtagagggtatttctcagctgcttggctagtttaacagatgaaccaaatatcataatacgccatatgtatcttgtgaaataggccacaacagcagctcctagcaaaatgccaaccatctgcattaagcgctttccattcagcgtcccttctttaatgccatctaccgttaaaccaataattttaggcgggagaagttctaatgctgccacaataatgagcagcgctatccccgttatataagactttttttcctgtttgaaaaaccaccataactctcgaaaaattttcatcgtatccccctagccccacaactattttcttatctctatcataaaacaaaagacacccttctgaatagagagtgtctgtccaattaaccattatttaatttggccgttcattgctttcatcatttggttaatttttttctgcgatggtttcatgcccatttgcatcatcatcatttttaacatttgttcattaattggtggatttttcttcagatagctcatcatatacttacgagcaatgaaaaatcctagcgctatcccaacaattaatgctagaacaccaactagaatatacattcccatggtattacttcctccttcgtgttgtctaacttacagtgtactagaccatacgctattatacaatatttccgttccaatttccttaaataattacacaaattttcttgttttcacaggcctcagccagccgtattcatccgttccataattcactgctaaaaaacaaggatctagcttgcgtaatacttcaaaaaaagctgtctcagcatcaacattgccatctccttcaattgttatacagcgattcgttaattttatagatgctcgactttttttatgaggatattccagcacaaacgtctcttgatgagtaaaaaaatgaggataatgagaaaacgcctgaagcaattctcgttgaataaatgaaatgggcagttggcgagtaatgtaatgaacttgtttttgtaagtgcgtttcctgcaagtgacgtttcattctatattcaatcagcagctgataaatgagcttttctcttcgaaaataggatgatgcaacttcttcctccattaaatatacttcatacgttctcacgattcatcctccctttcggctcgttcttttttgtaccattataccgaatggtgtacgcaatgcttgtctatcgatgaaaaaattcctttgtttttttgtcgaaaaaaaagagcagaccacaggagtccgctctttcttatgaaaaagaattatgcattaagcaagcttttcacttttgctactacattttcaactgtaaaaccaaattctttcatgattgtttcaccaggagcagatgcaccgaagtgattaataccaagaacttgtccttcgtctccaacatagcgttcccagccaagtgtagaagccatttcaatacctaaacgttttttcactgatttagggataacactttctttgtactcagcagattgctcttcgaaacggtcccatgcaggcatacttactacagatacgtcaatgccttctgcagctaatgctttttgtgcttctactgctaggcttacttcagagcctgttgcaagtattaatgcatccgcttggtctttaccagctttagatacaacgtatgcacctttagacacgccttcgtatgcattttcttttgtaccttcaagcgttggcaagttttgacgagtcaatacaagcgccgttgggcggtcagttgattctaatgctaggcgccatgcagcagctgtttcatttgcatctgcaggacgaaccactgaaagacctggcattgcacgaagtgatggtaattgttcaattggctcatgtgttgggccgtcttctccaactgcgatactgtcatgtgtgaatacatatgttacaggaagcttcattaaagctgctaagcgaattgctgggcgaagataatcagagaatacaaagaatgttcctccgaatacttttacaccgccgtgtagagccataccgtttaatgcagctcccattgcaaattcacgtacaccaaaccagatattacgtccgctgtaatcagctgcagtgaagtcttctgaacctttaatcattgttttatttgagccagctaagtcagctgaaccgccgaagaattgaggtacagcttgtgctactgcgtttaatacttctccagaagaagcacggctagctaggcttgaacccgtttcgtatgctggaagcgtttcttcccagccttccggtaactttccttctactgctagttcaaattgacgacctagttcagggtatttttctttatactgtgcaaatacatcgttccattcgttttctttcttttggccatcttcagcaattgtagctttgaagtgagcatacacttcttctggcacatagaaatcttcttcaaatgtccatgcataagcttcttttgttaattttgtttcatcggaacctaatggagaaccgtgcacgccagaagtacccgcgtggtttggagaaccaaatccgattgttgtttttacttcaattagcgttgggcgtgttaaatcgccttttgcttcttcaattgcgtttgcaatcgctgtcaagtcattgccgtcttcaacgcggattacttgccatccgtaagctttgaaacgatcttctacgttttcagagaacgagcgatctaaatctccgtctaaagaaatatcgtttgaatcgtataaaacaactaaacgtcctaattttaaatgtgctgctaatgaagctgcttcagcagatacaccttccattaagtctccgtcaccacaaataccatacgtaaagtggtctacaatttctaaaccttctttgttgtatgtttcagctaaatgacgttctgccattgctttaccaacagccattgcaataccttgtcctagtgggccagttgttgcatcaacacctgctgtatgaccgaactctggatgacctggtgttttacttccccattgacggaagtttttaaggtcttcaattgataagtcatatccagctaaatgaagcaagctgtataatagtgccgatccgtgtcctgctgataatacaaagcggtcacggttgaaccagtttggattctttggattgatgttcataaattttgtccacaatgtatatgccattggagcagctcccattggcatacctgggtgacctgaatttgctttttcaatcgcatcgattgataaagtacgaattgttgcaatcgaaagatcttcaatacgttgtgtcatactcttcattcctttcaaaactatgtacatatgttatcatactaatgatttgcttatttgtacaatacttgaaccaaaaaattttccacttttacagtttttgtgtgccttattaaaaatatacaaaaaactagagggaacattccctctagttttactagaacgtcttagtgaagacgcttctttttactctcttttaacttcttaggcgtaacatctttaccttcttcgtccacaactttaatcgtatgaaggtggtttgtcatagattgtcggaaaacttttaaatattcctgacgtagctcttgctgttctttcgcttcagattctgtcagaccttcagcctttgccttttttgaaagagcattaatacgagcaagtttatcttttgatagcatataaaacctatctccttataatcaataattaaaattaccgaaccgttccggcaacatgtagtcatcttactaaatctctttcgttttatcaagagattgagcactctcttggtattcttgatagcggcgatgtaccgtcgcttttgaaatattatagccaaaaccttttagcgtaactgagatttcagcaaaggttaagccgttatgacgaaggcggacaatttcttcaattggcgcttcttttttttctcttcccgagttaactccttgattttttaaattttgctgcggacgataaccgttttctacagctcttttcattcctcttttaattttagcattatgtaatttccgctgatgctcttccactaagctaataatatctaacaccattgaatcagattctgaaagctgaagctggccttgatgactaatcgtatagatggtagcattttctttatgaaaagcatgaagcagcgcaattcgggcatttcctctgcctaatcgtgtttcatcttgaataagcaacacagatattttttcttctttcattgtatgaagaacatccaaaataccctctctgtctacttcatatccgcttgctttttccattacgactttttttacgtctagatggtgaagatcagcaagcttttttaattcttcttgctggcgctgtaaagatgtttcttgggtttttttatccgtactgacacggcaataaataatggcatccacttttatcacgaccttttcggcttctaacaatattcaggaacgaccgttacacactactgttcaattgccacttgattatgtaactctttttttaaaacaggaatatataatttatctccaggagataaagactggacagtgtctgagtttaagtcattgacgtcttcaacccatttgacaaattcattggtggtcaaatgatggtgattatgatacttgttggacaattcccaaagcgtatctccttttgtgatagtaaccgttgaatatttgtctaaatctactttatccgctcctaaaaccagcgtcaatacatatgtaagtgcagcgataactgcaaaaaaaatagcgtaatgtttcatagaatgtaagaattgttgcatattatgatccccctatcagaatatatgttcttattttagtgagaacatttgtttctgtcaatggaattcttcgaacttatgtttgtatattgacacatcacgtggtataattcacctaaagaatagctaaaattgaggtgaaaaatatgaagctatcaaaacgtcaacaagacatactagattttattaagcatgaagtaaaattaaaaggttatccgccttctgttcgtgagattggggaagcggtaggattagcctctagctccactgtacacggacatttagctcgtttagaaagcaaagggttaattcgcagagatccgacaaaaccaagagcaatcgaagttcttcaactagacgaagtaaacatccctaaaagcaatgtcattaatgttcctgttatcggtaaagtaacagcgggtctgcctataacagccgttgaaaatgtggaagaatatttccctcttccagataaattcgtttctccagatgatcatgtatttatgcttgaaattatgggagaaagtatgattgaagcaggtattctagatggcgatatggtaatcgtacgtcagcagcaaacagctaataatggagatattgtggtcgctatgaccgaagacaacgaagcaacggtaaaacgtttctttaaagaagaaaatttcgttcgtttacagcctgaaaattcaacgatggcgcctattattcttcgccacgtaacgattttaggaaaagtaactggtgtgtatcgcacgattcactaatcagacactgtatgtaaaaccaactaatcatgatgttagttggtttttttacgtttgttttctaaaaaaattggcatattataaatgatacgttgaatcatcgcaggcaggtagaacggtttttgtaaatcttgttttaccttttttactttctacctgcatttcctcgactcttacaaggaaatacaaccgactataagaaggatgtagtttatgaccaatacaccaaggaaaacagaaccatttcaaaccattgtacctaccaaagcaatgaacatgtttctttttcctttttcctttgaccgaaaaaataaagagcagcttgttcatgcactagaagcaaatttgtttgagtttttttccattcaaaacaaacatgtagaaaaagaatactacggagaacagtattacgtatctcatgatagcttggatcaatattttcttccttacattgaatgtattctattccctgattcctgcgaaaaagaaggcttgcttcgattttcaaaaaaaatagaccataccgttacgctacaaacttcctccaccaccgtgtctagcaacgtgctgtctgtggatgtttttttatgtccttttgaaattggcgtcatgaccattcgcactgagatgagtcataatcattacacctatgatgacattttagaattcatgaatcattttcgtgtattagaaccgaagcttgctgaagagcatggatccaccattacctatgaacatcatcgctatagcaaagtacaggattatattttttcacagcttgcgccatttttgaacgaacacatcaaaaaagaagccacgcgtgaacagcatgtagggagccttccttattttatcgatgaacggatgtttgtattaagttatgtaacggtaaatcaagagcaagagattaactccacaactttatttcgtactgggcagctaaatagctatacgcctgacgggaaaccgtttatctctgcacacaaccacgagtatattaaaacgtataataccaaacacgtgtactccagatgggctcctgaaacctattacgttataacagaccatgtgttttcgtgtatttctaaatcgacagactctaaaacggatcagcttttgatgaatcatctatttggccagcattactataatttatttttgcattttttctataaaatcgtgttgctaaaactatcttatgagtattctcagctcacgtttcataaaaattcagagggcattgagcgactaatccgctctattaccgtattttcaggtaaatatttatttttagaaattagctctcgcacagaaggtcaagagttttctgagctctttaaaaaaatcttccacatcaattctctttatcaagaagtcaaagaaacccttggtactttgtatcaaaatcaagagaaaatcgcggccaagcgtcacaattacttattattaattttaacgatttataccgttctttccggtatttacggaatgaatttagttattagcaagctaaagggaaacatcaattgggatagtatgaagcagttttctatctttgaatatatcgctttaatagtagctctatcaggaattctgatcagcattagtctcggagtgagctccctatggaatttattaaaagatcgatttaaaacataaaagctgttcgcaccagagaatacacatttaaaaagagaagaggtcgagacataactccctctccaatctacagacgaacaaatcggatacatgagctagtaggagtcgcttgttacaccgctggtgatttctgagcaagacttcgctttccgcgggcggccggtgagcttcagcaggagtcttcgcctgcccttcaatcaactgctagaagcaactaaaaacatgaagcctacggtcaccataccaataaaaaaatccgaacgaattggattctccatcaagaatctggattgatcgttcggatcttcttcaattaaaataattttgtccaaacctcttctttttattctttttgaagctgtaaatcacttggcgcccagtccggaattccatcatcttcatcaaattcaataatgacatccgttactcctttttcctgtaaaatacgattttccagacgatctttaatgtcatcagcttctgccactgttaaagaaggatcaatttctacttttaattcaacgtgaagctcttctccttctttcatcaccattaatgtttgaatatcacgcacttgtacatcttgcatgacaatcgcgccaatttttatttccatttctttatctgcttcaccaagcgctccagcagcattatctaaaaatactcgtcctaccacaaaaaacatcataagcccaattaaaatagaagcaattccttcagcttggtgaaaaggtgtaaaccgtgaaatgaaaacggctattaacgccaatacgcctcctccagtagctaccagatcttccataaagaccagcttggttgctggctttgctttccttaaatgaacaaagctttgggtaaaaacattgacctctgcagtattcattccgacatcgtgcaaaatttctttcattgccttaaataggacaaacatctcaagtaacaccgagatgccaagtactgcaatatttaaaataaagcctgaagacttcgtgggatgaagaatatggtgatatccttctttaatcgtttcaaacgccataatccctactacaagaactgctcctaatagaacaagattaaccaatcggccgaaaccgtttggaaatcgtttggtcggggcttttttacttaatgccgaacctataaagacaaaaaactgattagctgcatcgcctaagctgtgcatcgtttcagcaaacattgctacattccctgttaaagcgaaggcaatacctttaatgatagagataatggtattaactacagcggccatgatggctgatttatttccctttcgcaacaatttaattaattcactcatacaatccctccgtttgcgcctttgatgagattcgattacggttagtgtatgtgaatttaaaaattaaaaacctccaacatacaagttggaggtttttagtcatgtttcattattttttaaaacggtacggtacagttgtaacaattacatttttacggtaaagcaaatgtgcttttaacaacagactggactgattgtgaaggatattttgccagctttttttcgtaatgaattgcggaataacgaccgtaatagccatattattttcccgagctttttcctcagccatatcgatgaatcgaaacagcggccgaactaagctgcggtattgagaatgaaacgtaacaatacgaatatcaggctgccacttctcccacttctcttccattctcttttcgctttctcgatcaaaggccacatgcactgcaataacggtatcgccaatcgttcttgcataatttaatgaattttctactacctttgtcattcctgctacaggaacaatgaccacacttccttcaagctttccaatcttttctccttgcttaatgcgaagctgctctcctaccgcttcataatgcgtatgaattcgatggaaaatatagacaataaccggtaagaaaatgagcacggaccatacttgtgaaaacttcgttgtaaacaaaataattagcaccgttaaggtaatgagggcaccaattaagttaatggttagcttcccttgccagccggccggcttttctctaagccatttgacaatcatgcctgtttgagaaagcgtaaatggaataaacaccccgactgcataaagaggaattaattgttcagtcgctcctttaaaagctacaattaagacaatagaagcaattccaagggtcacaattccatttgaatagcctaatcgatcgccacgaatttgaaacattcttggcatgtatttatcagacgataagttgacagccagcaaagggaaagctgaaaagcccgtattcgccgctagcactagaattagagctgttgtgccttgaataaaataataaaatccatttcgtccaaacacactcgatgcaatttgtgatacaaccgtttcatctgcttttggagaaatgccaagccaataagctaaaaacgtgatgccagaaaataaaacggctaaaataccgcccatcagcattaatgtatgaacagcattttttgcacctggctctttaaagttaggcactgcatttgaaatagcttctacacctgtcaatgcggaacagcctgatgaaaaagcttttaataataaaaacaaactaatacctggcactactgtaccgagagatggatgcagctcaggtgaaacttgacccgtcgctattttaaataagcctaccgctattaacaaaataagagcaataacaaataaataaaccggataagctaatacggaagcggattctgttacaccacgtaaatttaagacggtaataaaaatcaccagcaaacacgcaattactacattgtaatgatgcagcgcgggaaaagccgaagttaaagcatcggttcctgctgaaacactcacagcaactgttaaaatataatccaccaacaatgatcccccagcgataagcccgggattttcccctaaattggttttcgaaacaatataagctcctccgccttgcggatacgcataaataatttggcgatatgaaagaattaaagccgtcagcagaaccaataccccaagcgcaattggaatcgaataccaataggcaaggacgccgactgttgcaagtacaatcaaaatttgttctgttccataagccactgaagataaggcatctgatgataaaatagccagtgctttaagcttactaagtttttggtcgcctaactcttttgttttaagcggctttccaatcaataatcttttgagaactgaatagttcacgtaatttccctccgatgattgcttagctactatttactgttcattgctaagctccgttacaagttcataaataagtgatattatccctaaaaagtacctttttatgttaaaaaagcgcacaaaaaaaacactaagggttctcagcgtttttacacagcttaaacctcctctccaaaacgcttatggggttagctgtcggattcgggctatgagagtagccctaccttttaaaaaaaggattcaccccaagtgacaatgcacaaatttgggtcccccacttctgacgaattaagcgataacaggtcaatataattttcggttaaagggtatgatcgataacatgtttctttcataactatcctttgttcttagataatatactcccgtacaaatggtttgtaaagcattattttacgtaaaccataaaatagtgcttaaggcacttttaacagaaaaacaaaaggtcttctgcccgcgtacagaagacttttttgctttaactttttgcttttaaaacggctgctagcttgtttttcgtttgaggaccataaatgccatccacatcataaggaagatacacaagctgaaaacgtctgactgcatctttcgtttgaactccatatattccgtctactgaccctactttaaaattaactgcgtttaatgctttttgaagctgtttcacggcttctccagaatcaccttgttttaaaattccatttggaagtggatattgttccgaaggtggagttggtgacggtgttggagatgggtttggtgaagttcctgaaggaataacaattgtttttccaacctgtagggttaaaggatcagaaagccctttatttgcttcttgcagcgcttgtactgttattccgtacttctgtgcaatactgtacagcgtatctccttgcttgatcgtatacgtttttgtacctggttcagaaggtgatggatttggtgtcggtgtcggtgttggagatggtgatggatttggaactgcacgccgaggtaaatttaaatatacggcaattcctttagcatacgattcacccatactttttaaaaaagcttcattttgaagaagtgctgcatcggcgctcctatcaataaaagctatttcagtgagtactgcaggcatatttgttaagcgaagcaccgcataattggctgattttcgtccgcgattcggatgattatacgacagcagcgttggctgtacttgaccgtgcacaatcgattgaaacgttttactggcattgctagcgcttctataaacataatcttcgtatcctgttcctccaccggcatttacgtgaatagacataaacgcatctgcgccccacgaattagcttgagaagctcgctgagataacgataaaaaaacatctgtggtacgagtggttttaatcgtaaaatcactgtacatgctatttaaatagcttattaaatattgttgaatttttaaaactaagtttttttcatacagtccgttcgctccaactgctcctacatctgccccaccatgtcctgcatcaagatagatttttttcatgttacttgtccctccttattgttaacatatgcacgagcgaaaaaagtgctacgtatactagcctaccaggtgaaaaatcactaaaaaaagacccgctgcctaatggtaacgggttattctgctttatagacagaatactgaataagggtagctctcaaggagtgacagctatatgcagagtgttgatttgttgattgaatgataataattatcattttcatttaaagtatacactatgaggaaagttttgtctattttattattagatttggagctacttaaaaagcaggatacctataacaatgagaatagtccaaattggaatgcttattaatatgcctattactaaacctttgaaaaaatttccttcttgcatttttattccattcctctccaacagtattttctaatgacactacgactggctgaaaattctctgaagttatactgaagtgcagagtgaacacataaacaatctctctatctgttatacactacttttacatatagattcaatgagacaaaaagcttatcctttttaattcatataaccaaattctttcctgtatataacaaaacaacaaaaatcctcccgtaaattttacgacaggcagttatacttgttttataaacagcttagttcgatatttaatatgcgcaatgttattcattttgaaaaacaaaaaagtccgagagaacgtataaacgatctctcggacttttaggaattaatattggctcatgtattggtcacgttcccaaggatgaacttgtgtacggaacatatcccattcgatttctttcgcttcaacgaagtgctctgctaagtgttcacctaatgcagaaaccataacttcgtttgattggaagctatctaaagcttgagctaatgttgcaggtaaatctacgataccttcttcaacacgctcttcttttgtcattacatagatattacgatcgataggttttggagcttcaaggttgttcttgattccatctaaaccagcttttaatagaacagccattgctaaatatggattagcagctgggtctacgctacgtacctcaacacgagttcctacgccgcgagaagctgggatacggattaatgggctacggttgcgagcagaccatgcaacataacaaggagcctcatatccaggtactagacgcttataagagtttacagtaggatttgttactgctgtaaagctgtgtgcatgcttgatgatacctgcgataaattgacgagcagtatcacttagctctagattaccgttttcatcataaaatgcgttttgaccatctttaaataatgaaacgttacagtgcatacctgaaccattcacaccaaataatggttttggcatgaatgtagcatgtaagccatgtttacgtgcaattgtttttacaacaagtttgaacgtttggatatcatcacaagcttttaatgcagcagcatatttgaagtcaatctcgtgttgtccaggagctacctcatggtgagatgcttcaatttcaaagcccatttcttcaagctctaatacgatgtcacgacggcagttttcaccaaggtcagttggcgctaagtcgaagtagccacctttatcatttaattctaatgtaggttcgcctttttcgtctaatttgaataagaagaactctggctcaggtccaaggttaaagtcagtaaatcctaactcttccatctcttttaacacacgttttaagttattacgtggatcgccatcaaacggagttctatctgcattgtagatgtcacaaataaaacgtgctactttacctttttcagatgtccaagggaaaataacaaatgtatcaatgtccgggaataggtacatatctgattcttcaatacgtacaaacccttcaatagaagaaccgtcaaacatcattttgttgtctaacgctttttctagttgacttactggaatttcaacgtttttaattgttcctaaaatgtcagtgaactgaagacgaatatactttacattctcttcttgaactttgcggaaaatatcttcttttgtgtactttgccatcgtgtgatcctcccctaaatctctatataatatttataatctataccactcatatacgaacggcataaatattgataactttattaatgaaagaacctggacatatctccttgatttaaagttgctcgattaaaacggcctgcttgcataagttctgcacgaagcatttttcgcaattcatcgtccgttaattctggctttgctgttgctgccacaactttttcttcttgcttatgccctttttgctccttttgaagatgaaacagctgttttacacctgctaagttcacaccttgttcaataagatcacggatttcaagtagcttatcaacatcgttaaatgagaataatcgtcgatttccctctgttcttactggtgcaactaattcatgttcttcatagtagcgaatttggcgagccgacaactcagttaactgcatcacaattccaattgggaaaagtggcgtatttcttcgaatgttgtcactcatttcagttcctcctttggattaactatttacattgtatgctatgttagttcacctgtcaaccgaatgttagtaattctaacataaatttttctgaacatttcttctatacaaataaatagcgcttcgtttatttttataagcctatcttttctttcttagcggggagaaaatagtctttctatcttatattttataaaagttctttcgtcagcatttgatctactgccatgcatattgctacttttacgtgagcatacgttaacccgccctgcacgtaagcaacataaggaggcctgataggtccatctgccgtcagctcaaggcttgctccttgtataaacgttccagctgccataatcacatcatcttcgtaccctggcatataagcaggataggccgttacgtgtgaattaattggcgaagcaaattgaatagcctgacaaaaagaaaccatcttatcacggtcatcgaactgcacggattgaattaaatccgttcgttcactgttccacttcggttcactttgcatccctagctcttcgaacatagcggatgagaaaaccgctccttttaatgcttgaccgactacgtgcggagccaaaaagaaaccttgatacatttcttgcaagctatacagcgtcgctccagcttctgcaccgattccaggagttgtcattcggtatgaacaagcttccactaggtcttttcgtcctgcaatatagccgccgattttagcaagacctccaccagggttcttaatgagcgaccccgccatcaaatctgctcctacatgcgttggctcgattgtttctacaaattcaccgtagcagttatcgacaaatactataacgtcaggcttaatactctttacaaaagaaatcatttcttttatttgcgcgactgtaaaagaagggcgaatgccgtaaccttttgagcgctgaatgcctatcatctttgtgtgctcatgaatagacgctttcacttcttcaaaatccacttgaccttgcgctgttaaatctactgatttatagctaatattatattcttttaaagagcctacgccgcttcctcgtataccaacaatttcttcaagagtgtcataaggctttccagttatatataatagttcatctccaggacgcagtacaccaaacagcgatataccaattgcgtgcgtacctgaaataatttgcggacgcaccaggcaagcttctgttccaaaaacgtccgcgtatactttctccaacgtatcgcggcctagatcgtcatatccataccccgttgtcggattaaaatgtgaatcactcactcgattttgctgaaagctttgcagcacccgaaattgatttgcttcaatgcgctcgtcaattttctcatgtacaggcttaatttgtttttctacttttgcagcaagttcccgaatgtgtgccccgttttttaactgatcaaacatcatttctttgttcctcaactttcttcaaacgtttgtagctttttgtaaaggggatgctcttttgcaatataccctttgcactgatacttctcagtttcttcattaaattttaacgactcaagaatagagaccgttttgagttcagcgagcatttttccttcataagccggcagcagcacatgaaaaaacgccatttcttttttcatttcttcttgaattctttctccaagcttcactaaatcagtagctttaaaagcgctcattgataaagatgtggaagcggatgggacaaatagttcatgctgcatatcttctttattgtaaactgtcagcatcggaatgtccgttacgttcagctcttctagtaagcgatgcactgttttttcgtggttgttgtaatctggattagaagaatctaccacgtgcagaacaaggtcagcttcggttacttcttcaagtgttgaacggaacgcggctactaacgttgttggaagatcttgaataaatccaaccgtatccgttaaaagagccgttagtcctgacggaagcgtatactgtcttgtcgttggatcaagagttgcaaacagctgattttcttcaaaaatacccgcctctgttaagcggttaaagatcgtcgatttaccagcgttcgtatagcccacaattgcaatttgatagacatgattacgcttacgtctttctcgataacgttcgcggtgacttaccactgtctttaactgacgcttaatttcatcaattttacggcgaatatgtctgcggtcactttcaagtttcgtttcaccaggacctcttgttccaattccgcctccaagacgtgacaaagcggtcccttgtcctactaacctaggcagcagataatttaattgagccagttccacctgcatttttccttctcgcgtttgagcacgctgtgcgaagatatccaaaatcagctgcgtacggtcaataacacgcgcagataaccctgctgacaaattgcggatttgactcggtgacaattcatcattaaatacaattaaatcaggctctaactcttcttcaagagccacaagttcttctactttcccttttccaatataagtagctggatgaatgcgatcgcgcttttgcgttaaccttaccagcacttcgccttttgcagtctcagttaaagatgctagctcatccattgaatattcaaaacgttcgtcatcgtcatgaagctgacatccgactaaaattacgcgttcaagttcagtattcatttctgctgtcaaagatttttccttcccttactattaaattgacaaatcattcatatcatatcaaaaaaatgtccatttctccatctttgcaaaagagacagaatacattgtcttttactagtttaacaccctttttaaaatctataaaacgatgattaaaaaaacattgaaatatcacgaaattctgtatacaatttgaattggtttacttatcgaaatttgaatcaggctgcctgattttaaaataatagtcgctacttggtgaaaacagaataaaggggatagcatcatgacttgggacgtacttagcattattggaacgattgcctttgcaatcagcggagctttcattgccatggaagaggagtatgatattttaggcgtttacatactgggaatcgtaacggcttttggcggaggagccattcgaaacctgcttattggtgtaccggtgtctgccctttgggaacaaggactcttttttcagattgctttattatctatcactgccacttttttatttccaaacaatatcttaaaacattggaagcgatggggaaacttttcggacgccattggccttgcagcattcgcgattcaaggagcgctttatgccactcatatgaaccatccgcttagcgcggttattgtagctgcggtcttaacaggaagcggcgggggaattatccgagatttattagcacgccgaaagcctactgttcttaaagatgaaatttatgcggtatgggcgattatcgcaggatttagcgtagggctgcatattacaaatacgcctgtagaactttatacgttatttatcttacttgtaggtcttcggatgtgttcatatatttacaaatggcgcctgccgatcaaaacgattcgacaaccaaatatgtagaaaaaaaaagcctttcgtaacgaaaggcttttttttacagctgaatatcgcttgacgttaaagttagaagctcgttgcgctcaaagctttcttcttctaaaagcctcatggattgagtacgtatggaacgttcgataatgtttcgcacatatctaccgttactaaaatccctaggcgtctgattgtacttcacgtccataaaatgatcttttagctttttataggcctctgtactaaactgatactgcctgtcattcatcatgtgaccggcaatgtccatcagttcattgacatcataatccggaaaatcaaaaataaacggaaacctagagcgcagccctggattaagacttaagaaattttccatttctcttggataaccagctaaaatcaatacaaacttatcatttgaatcttccatatgtttaaccaatgtatcaatcgcttcttttccaaaatctttttctcctcctcttgcaagagaataagcctcatcaataaataaaatacctccaagcgctttttttacaagatctctcgttttctgagcggtatgaccaatgtattctccaactaaatctgcccgctctgcttcaattaaatgtcctttagacaagatgttcatattcaaaaataatttacctagcaggcgggctaccgtcgttttccctgttcctggatttcctttaaacatcatatgcagcgcctgctttcccgcttttaagccctgttcctctctttttttgttaatatataaccacgcatatatttcttttatcatttttttcaattcttccattccaaccagtccgctcatttctcgttcaatttcccgaagcggctcatgatttatgacagcttttttggcaggacgcggaattgatgtcgtatacgatttttccttttttgtttcattatttaaaatgatattaatttgcccattatttttaagagttatcggctgttccaccatgttcacctctcgtttcatcccacttctctgtatcgcatagctgcatgcgatgaacgatacgaagacaatgatcccttattaccgaagaaataatcgtctattataaggtttatgttcaatgagtaaaaacaatgttaagaaacttttctaagcctttatttacataaaaaaagcatccgaatatgcggatgcttctctttaatctctattcaagttctactgtaatatttttatttggtacaaatgtcgaaatcgcatgtttataaatcagctgctgttttccttcagattcaattaacacagtaaaattatcaaatcctttaattagtcctcttaattgaaaaccatttaaaagaaatactgtcacatagatattttctttacgtaattgatttaaaaattgatcttgaatattaactgattgtttcattattcggcctcctcgtttctctatctgtttacttaattcgcttctttcttcagctttcctgcaatatatgtaaaaatttcagcaaacttttcgggaaatttgtcaacttccatctctatccattttacaggcattttatttcgaaaccacgttaactgacgctttgcatatctgcgtgaattttgtttcaactgttcaacggcttcttcgagcgtacagcgtccctcaaaataagcataaagctctttgtagccgatagcttgaattgattgtacatcatgcagaccactttcgtacaatgatttgacttcctcaagcagtccagcctgcatcatcatatcgactcggtgattaattctctcatataatacgtctctatccattgtaagtccaataatggttacatcgtataataactcttgcgactgttcttttgtatagtcactgaattttttgccggttacttcataaacttcaagcgctcgaattacacggcgatggttatttttatgaatagcagccgcactgtctgggtcaatttctttgagcttttcatgcaggggatcgatgccatgagcttcaataaatacttccattcgttcacgaactttttcatcactaggagtttctgtgaactgataatcataaataacggattgaatataaagacccgtccctccaacaatcatcggcatttttcctctagcatgaatatcatcgatttgttttcttacaatctcttgaaattctgccacagaaaacgattcatccggctccttaatatcgatcaggtaatggggaaccccctgcatctcttcttctgacacctttgctgttccgatatccatccctttataaatttgcatcgaatcacctgaaataatttctccgtctaactgtttggcaagttcaatgcttaattttgttttaccaaccgcagttggtccaataatgacaataagttttggtttctctcccgtcataacaacactactttcatctataggcattcacatcattccattttatccaaatggtgatgatttattcaacaaaacggctagctgcagctagccgcattgcctacatcactcgcttaaacattttttccatttcatacgtcgaatgatgaataataattggtcgtccgtgcggacacgtaaatggatccgtagtttttctcaacgtttcaagtaaagcaaaaatctcatcgtttcgcaaatgatgattcgctttaatcgatcctttacagctcatcataatagccgcttcttctcgtaacttttcgatattgactcgtttcatggtaaagatttgctgaatcatttcttcaatggtttcctgttcctctccttttggaaaccactgcggatgcgaacgaactatataggagttttgtccaaacggttctaagaagactcctacttcagcaagcatgtctttgtattcttctaaaatcaaagcttcatttcccgagaactctagcgtgagcggcataagcagttcttgaacttctgaatctacttctccgagctttcgcttaaaatattcgtacttaattctctcctgcgccgcgtgctgatcaataataaataatcctttttcattttgtgccaaaatatacgttccgtgcatttgaccaattgggtacatcgcaggaacacgcggttctggctgatcttcggctgaatggttcggttctggaataggagcgttttcttccaccgattcttcatagtgttctatttctcgaaacgttggttggagttcttcatcttgacgtatgacctctgttttaacaggcggcataatctcgtctacacgagccggagcctccttaaaactaggctcgcgaaccgtattagaaggctgatagccagacgttttagactgatgatcaaatgtaaaggtctgctgctcagttggctgaacagcagattttgacttagttggtactacagcatccggaattaactgctgctttttaaaagcagctttcactccttgttcaataagctcaaacagctccgcttctttacttaagcgcacttctagtttcgctggatgaacattcacgtccactaacaaagggtccattgtaatggttaaaaacacgattggaaaacggccgataggtaaaagggtatgatagccctgctgtaccgcttttaacagcccgtagtttttaacaaaccgaccgttaataatggtggacatatagttacgagaagctcttgtaatttcaggaagagcgacgtaaccattcacttcataatcaagtgactgaacgttaatcggaatcatttttttggctactgccattccataaatagcggcaagcacttggcgcacatctccgcttccgttcgtatatagaagctgtcttccttgatgcatcagccgaattgaaacttcaggatgagacatcgcaaggcgattgacgacatccgttacgttaccaagctctgtgtttaccgtcttcatatatttcaaacgtgcaggtgtgttgaaaaataagttttcaataacaagttcggtaccttttcggcttgacgttaattcgtgatgaacgatttctccgcctctaagtttaagatgagtgccggcttcttctcccgtactcgttttgagttcaagcattgaaactgaagcaatacttggcaaagcttcaccgcgaaatcctaacgttcgaattcgaaataaatcttgttctgttttgattttacttgtcgcatgtcttttaaaagcggtcaagcagtcttcagaagcaatgccgtctccattatccaatatacgaatttttgaaagcccagcttcttctagctcaatttcaataactgtactgtttgcatcaatagcattttcgactagttctttcaccaccgaagcaggtcgttcaacaacctctccggcagcaattttatttgaaagttcgtctgaaagctgcacaattttacccacagactcactcctctcaatctatttcttctttaatgatttttgcagttcatacatcgcattcattgcgtctaaaggcgtcatttctaaaatatccagctcttttaaacgatctataattgctttttcccgtttcgaaagcgcaggcttttcttttttctcttctatttcaaagaacgaaagctgattggcttcatctgcttttttattatctgcacgttcttcttgaaccaaagaagcaccttcttgtggaacttgttgtgtcatctcttctctttttggagcctgacgtacaggttcacgctcagaagattgttctaagtcgtgtaagatgacgcgagctcgctctagaagcggatctggaagttctgctagttccgctacgtgaataccataacttttatctgcagcaccatctttgattttgtgtaaaaagacgactttcccatttttttcaaccgcgcttacatgaacatttttaagcgcaggaagcgactcatcgagtacggttaattcatgataatgagtagaaaatagggtcttacagccaatatgttcatgaacgtattcaataattgcttgagcaagagccattccgtcatacgtagacgtgccgcgtccaatttcatctaatagaattagactcgactgagtggcatttgtcactgcatttttcgtttctagcatctcgaccataaatgtactttgacctgaaattaagtcatcggctgctccgatacgtgtaaatacttgatcaaaaatcggcagaaccgcttcgtctgctggcacaaaacagccaatttgagctaatatcgccgttaaagcgacctggcgcatgtacgtacttttaccagacatattgggtcctgtaatcagcaaaattgaactatcatccgtcatttgacagtcgtttggcacatattcctgcgaattcattactttttctaccactggatggcgtccattttgaatcgaaatatcttcacttgaaaaaataggcttcgtgtaatgacgttcttcactgatttttgcaaagcactgcagtacatcaagctcacttacttttttagcgagttcttgcagccttgggatatatgcttttacttcctcacggatttgtaaaaacaattcatattccagctctacaattttctcttccgcttctaaaatcagcgcttctttttctttcagttcaggcgtaataaaacgttctgcattggttaacgtctgttttcgttcatacattccttcaggcaaaagatgcagatttgcccgcgttacttctatataatagccgaacacgcgattataaccaattttcagtgagcgaatccctgttttctcacgctcttgctgttcaagtgacgcaatccacgtttttccgtttcggcttgcatctcggtattggtcaagctgttcatgatagccgtcattaataatgtctccttctttaattgacaaaggagggtgctcttttaatcctctttcaagaagattagctaatcgctcacaaggatcaatgtcttcaacaagctttgtcgcataaggatgattcaaacgattcacaacctcttgaatatgaggtacattttgcaatgatttttttaattgaattaaatcacgagcatttacattaccaaaagcgactcgaccagctaagcgttctaaatcatatacgtcttttagcaactcacgcagttcttctcgttcaaaaaactgtttcattaagacatctaccatattcaaacgattatcaatatccgcttgttttaaaagcggacggtcaatccaattttttaataaacggccgcccattgccgtaacggtctggtctaataaccatagaagcgagcctttctttccttttgaacgaatcgtttcggttaactctaagtttcgcttagagaacaaatcaattttcatatattcattgatttgataaaactgcacgggctgtaagtgttcaagcgaacgcttctgcgtgcgagttaaatactgaagaatacgcgcaaacgttgtgataagcttttgctgctgaagcgactctactaaataatctagtccttctacttgctctgtactattctcataagaaatggtaatcgtcatgcgctcttttagtgtttgtaataagtcagcaggaaactcagagcttacaacgacttcttttgcttcttttgcataaatctctgagactatatcgtgaaacgaactaacaagcgttacgctgttttctcctgtagacaaatcagaaagagcaagaccaaacgtttgatcctcgaacgcagtaacagaacaaatatagttattttccttttcatgcagtccgcgttcgttcatcagtgttccgggtgaaatcacctgcaccacttcccgctttacaacaccttttgcatgcttagggtcttctacttgctcacaaatagctactttaaatcccttttcaattaaacgctcgatatacgtaggagcagagtgatacggaaccccgcacatcggaattctctcttgtcctcctccgtctcggcttgttaatgttatttcaagttcttgagaagctgtcgtagcatcttcaaagaacatttcataaaaatcacctaatctaaaaaacaaaaaggcatcttgatactctgccttaattctcaaatattgctgtatcattggcgtatacgctgccatactattcctccataccacatctagttgtgcgtttttgctacacgtattataacataagtctttcttaaacttaatttattcaaatagaacaatcttcaatttcttttcataaaacaaataaaaaagcttcggacgaaggaagaagcttgtccgaagcttttcattatttactgctgttcaaatgactatgcttacgtccgtataagaagtaaaccactagccctaatacaagccaaattacgaaactaatccatgttaactttggaagctgaagtgctaagtataaacagaacacaaaagctaaaattggaatcaccggcacgaacggtacacggaaaccagtcgattctgaagtttgttttgatttacgtaaatataaaattccaattgatacggtcatgaaagcaaaaagagtaccgatgtttgttaactcagctaatcttcctaatggtactaaaccagagaagatggatactagtaaacatgtaatccacgtatttactaccggcgtttgttttttctcactgatttttgaaaaaggctttggcaatagaccatctcgactgatcgcataaaataaacgagtttgtccatacatcataacgagtaataccgttgtaataccaacaattgcgcctaatgaaataaatcctgctacccagtcttggttaatgtagcttaaagcaaacgctacagggtttttaacatttaattctgtataaggtacgattcctgttaagataagcgatacgacgatataaaggactgtacaaatcgcaagagatgcgataattccgattggcatatcccgctgaggcttgcgtacttcctcggccgctgttgctacagcatcaaacccaatgtaggcgaagaatacagttgctgctccagtcgctactcccgagaaaccaaacggcataaacggcgtccagttttctggtttaacatagctaactcctaccccgataaacagaagtacaacagccagtttaataataaccatgatagcattaaaacgtgaagatttttttactccttgagttaaaagtaatgtgattaaaaatacgatcataattgctggaatatcaatataagtgccgtttgcaggattatatgcacttgttaaagcttttggaaaatgtatgccaaaccctgctaataatccttggaaatacccggaccatccgctggctacagcagaagaagcaagaccgtattccaagataagatcccaccctaaaatccaagcgattaattcaccaaatgttgcataactgtaagtgtatgcacttcctgaaacgggaactgttgaggcaaactctgcataacaaagagctgcaaacacacacgcaagtcctgacataatgaaagatataactaaagctggaccggcatgttcagcggcggctacgcccgttaatacaaaaattccggttccgataatggctccaatccctaacattgttaaatcgaaagcgcctaaatccttttttaatttaacacctttagagttggtttcactaattaacgtttgaattgattttttacgaaataagctcatagtaaacccccaaaaaatacttatctgatataactaaattttctgaaaattaatgcattattttctttagatttactatacactgcgcattcgacaaaaagcaatatatttttttgtttttataagaattttcttaaaatagtaaaaataaaaaaactaggaagaacttcttcctagttactcatcgtcccctaatataaaatcaggatccaaatcttcaaattcatcgtcatctacgtctaaatcaaactcgtcttcatcatcgcagcctttcggatttactgcaacacaaacctttgtttcaccaatcacttccgccaacaattctctctctacttgaacaatcgttttattgccatttggtgaaattgtgcactctaggcaatttggctgctgcagcacgcgaacaattacttcgtaatcgtctccaatcgaatcttcatctttatagcgcagcttaatattatctttgtatgatacggtttccgtccaaacttcggtttttgtattattattgtacgaataccaaatattaatatcatatctgccgtcaacttctacattgctgccgcttttctttgctttgtactcatggttaatcacccagcaccctaagatgcttgttggtcgatttttcggtgcaagcgtatgagacgattgtgtaaacttgcgacctttacctacgactgcttttgtaataatttctctatagtgttgtgacatgtgagcataccctcctcaaactatcttcatttcatcctatgcaggctcattcacttgtttgcacattatttttaagaaactaggtttaaggcataaaaaacctatgttccattgtatgcaaggatatagaaaaacgtgacaattattagagagaaaatctgcccaatttttataccacggaatgcacaaaaaaatgcctcagcaaattgctgaggcattttttctttatgagcagctagatccagggctgtttcgcacctgtgaacctgtttcaccgcgcagtaagtcaccatctgttgacacaataatttcatccgttactgtgtttgaaatagtgttagcaacaagttgaagcaaatcattcacgtttatttgagactcttgaaactgctgaataatcggcagttcatccaactcttcctgtaaacgatcgatttttgcctccacttgttttaacgcttctgttttaccataatgttggaaattaacagcttgtttttgcaaacttttaatgcttgcaatggtttcacgcactttttgattttcgttaagctgagcttcggcacgcttgaagaaatctacttcttccgtttcagcaatcatttttgccagctcttgagcacgtttaattacgtcactcttgttatactgcgccatattacttcacctctgctgtttcttctaccatttccccgtttaatgtccatgttttggcttttgtaacttttacttttacaagttgcccaatcactgacttaggtgctttgaagtttacaagcttacttttttccgtgtagcctgctaatacttccggattatttttactttcaccttctactaatacttcgacaactttaccttcatattccttcaatttctttgcagaaatttcatttacaagagcatttaagcgctgaagacgctcttttttcacttccattggtacgttgtcttgcatcttagcagctggcgtaccttcacgaggtgaataaataaatgtataagcactatcaaattcaacctcacgatatagcgacattgtttcttcaaactgctcatccgtttcatttgggaaaccaacaataatatcagttgttaaggatgctgttggaatggcttctttaattttacgaacaagctctaaataatgttcacgagaatattttcgtgccataatttttaagatatcgctgcttcctgattgaacaggcaagtgaatgtggtcgacaagatttccgcctttagcaagaacttcaattaaacggtcatcaaagtcacgaggatgacttgttgtaaaacggatacgagcaacgtcaattttacggatttcgtccattaagtcgcctaggccgtacgttatgtcttcaaaatcttttccgtatgcattaacgttttgacctaaaagcgtaatttctttgtagccttgagcagctaagtgacgtacttcttggataatgtcttctggacggcggcttcgttcttttcctcgcgtatacggaacgatacagtacgtacagaacttgtcacagccgtacatgatgttaacccatgctttgacgctgcctttacgtgctcttggaaggttttcaataacgtccccttctttagaccatacttcaatcaccatttcttttgctaagtatgcttcgtttaaaatgtgaggcaaacggtgaatgttgtgtgtaccaaaaatcatatccacgtgctgatgtttttgtaaaattttatttacaactgactcttcttgagacatacacccgcagacgccgattaatagctcagggcgctcgcgctttaaggccttcaagtgtcctaattcaccaaacactttattctccgcattttcacggatcgcacacgtattcaataaaataacatgagcatcttcaacagagtcagttggctcgtagccaaggcctagaaaaataccagccattacttctgtatcgtgctcattcatttgacagccgtacgtacggatataaaacttacgtccctgtcccattccatgaaactgttcatcgattgcaaaatcattgtgataggaaacttcttcttttcctcgttttttcgcatcttttaaagaaggtggcatgtatactgtttgaaaatatttgctgtaatccttttcggattttttgtccgctggattaacttggttgctttctaaacgttgtttttcgttcataaaaaaatctcctttcaccatgacaattgtcacgttgcacctgtaaatcgcaaaaaaatgtgacagccctatgcttatgcataaaactcatcacattaacatagtatataactttcaagtagcgaacacaatcatatacctattttctatacctgtttcgttaaaattccattcggctttcgaaacatttcttaaatcacaagaagagattgatacataactaaattattctattttagagacgaacaaacgggataaaagagctcatagaaattcgcttattacaccgctgttgatttctgtgcaaaacttcgctttcggcgagcggtcgatgagcctcctcgtcgcttccgctcccgcgggttctcacctatttcgcttttctcgcaggagccttctcctagctctccaattaacagctagaaaccactcactacatgaaacctacgttcgctatcactatgaaaaaatccgaacgagttggattctccatcaagaatctcagttcaccgttcggatcttctctctactaaactgcttttattgcagcctcttttacataaattcagctactagctcatcaaacttttcctcagtcatacctaagtctgcttttgacagcggctcttcactataaccgtgaacaagctgctgatacgacggctgatgcgcattttgataaataagtcctgttactaagccgttatgctccattaacgtctgcatagcttgcatacgattgtttgcatcataaccttcaattgtgctaagactagttaggttttctttaaaccaatcatacgtgttcactttgttatacgttacgcacgggctaaatacgttaattaaagaaaaacctttatgctggatgccttgttcaattaagcttgttaactcttttaaattcgttgaaaagctttgagccacaaacgttgctccagaagttaacgcaagctccatgacagataaagacgactcaattgatccttgaggcgtactttttgtcttgaatcctacttcactacgaggagatgtttgtccttttgttaaaccatagatttggttatccattacgatatacgtcacatcgatgtttcggcgaatcgcgtgtaccgtgtgtcccataccgatagcaaacccatctccatcgccgccagatgcgataacggttaagtcacgattagccatttttacaccttgagcgattggaagcgcacgtccgtgaataccgtgaaaaccatatgaattaatataaccagagatacgtccagaacatccaatacctgaaataacagcaagctcatgaggttctaaacctacgttagcagatgcgcgttgaatggctgcttgtacggagaaatctccacaccccggacaccagttaggttttacactgttacgaaaatctttaaacgttgccatttaacacaaacatctccttactttttgcgtatacttcttgcggaagaaatggatttccatcatacttcaatacgctttgaattttatcatgacttgcaatattcatttttaaaatattagcaagctgtccagtagcattgttttcaacgacgactacttttttagctccttgcacgtaaggaagcagttcgtcagctgggaaaggatgaattaaacgaatgtgagcgtgatttactcttataccgtcctgttccaaacgttccattgcctcttcaataactccacgcgtcgaattaaatccaacaaataaaatatcagactctttttcatgagagtgaacatgaattggcgtattaaaacgaattccttttgttttacgaagacgcttattcatttgatcatcgcggttcaccggagattcagatggctttcctgtctcatcatgttctactcccgttacgtgatgaattccatgcttcattcctggaatgacgcgtggtgatacaccgtcttctgttacgcggtagcgcttgtagtactgtttttcttccagctcttctagctctccttggtgaagcttaccgcggcggatttcaacgcggttatagtcaagcggttctactgattgcttcccaagtgaaagctgtaaatccgttagcataataactggacactgatattcttctgctaagttaaacgcttcaatcgtatcgtagaatgcttcttcaaccgtacttggcgccatgacgatcttcggaatttcaccgtgcgtaccgtaaatcatagccattaaatcagactgttcttgcttagttggaagccctgtactaggaccgccgcgctgcgtatcgataatcacaacaggctgctcagtgatacccgctaatccaatcgactccatcattaaggataaacctggtccagctgatgctgtcagcgcgcgtacgcctgcatagttagctccgatagccatcgtacatgctgcgatttcatcttctgtttgaataacggttccaccgaattgaggaagctttttaattaagtattccatgatttctgaagcaggggtaattggatatgctggcataaaacgagccccaccggctaaagcacctagcgcaatggcatcgtttccaatcataaacatacgttttttaccatccgctggatctagtttcattgtttctaattgttcgcctagctgttcacgaatgtaatctgcaccttttttaatagcttccatgtttttttgtacaactttttggccctttttaccgaagatttcaagtactacttcttcaaatacttctgtgtcaatatgaagcacagcacttgaagcgcctacagcaaccatgttcttcattagcgacgttcctaattccgttgcaatttccgtaaacggaacagcatatagcgtagcagttgtacatgtttcgggcagacttgggttgaatttcgcatctgcaattacaacgcctcctacgcgcagctcatggacgtttacatcgattgtttcctgatcgaacgcaactaaaatatccaaatcatctgacacagatcgaacttgagttgtactcactcgaatcttattatttgtatgtccacctttgatacgagaagaaaaatgacgatagccgtataagtaataacctaatcgatttaaagcggttgaaaaaatttctcccgtactttcgattccctcaccctgctgtccgccaactttccatgaaagttgctgtaccataaatcaacgccactcctttaattgctcataatatagaaatctattttattgataaaaactgaaaaaagtaaattagcaaacgatttcatttgcttctgcatttcacgaaccaaaatcatctgcaaaactcccacagcaccttgccgctgtgcaggatacgtttctgcttgaacagctccataatccgttttcaattttattccgattgccagaaaaatgcaaccctttccattgaattctcaatcgttttaattatatttatatttaatgaataagatgaagttttttaatgatcttttctgccttcacatgaggcattagtatataaataacttctataaaaaagagcttttccaagaagaaaaagctctttttttattagctgcatacgcgatcagcaaagttttgaaacagaaaacgttttacctgctcctcagtgtaatgcttaaggagttcttcgattaaattcgtatactgttcatatcttccgagacgatgaaccgttttgtcaatgccgtcaaagtcagagccaaaaccaacggagtattcgcctcctctttcacacatgtaatcaagatgacggatcacatcctctatttgcgctttggcagaactcgttaaaaattcaggcacaaacgtaatgccaatcacgccgtttcgctttattaaagcatgaatttgatcgtctcttaaattccgcgggtgagaacacaatacgtgtgaattggaatgagtagccactacatattgtgctagctcaatcacatcccaaaaacctcttaccgataaatgagatacatccgtccacactttatgttcattattcaattcaacaacttctcttccaaaagaagataaccctgcgcctcgaggttctaaaataccgtcacacacggcattgctataattccatgtcaaacctactgaacgtacacccagtaaaaaaagcgtctttaagcgaactaaacttgtatcaatggcatcgcacccttcaagcgtcagcattgctcctatttcaccttttttcaagctatctatatcgcgttttgaacgaacccatttcacaccgggaagcgacaaaatatgactctgaaacagctgtatcatttctaacgcaacatcaaagcgctgagctgccggaactgcttctggaatataaatagcgaatagctgaactttcccatttgctttttttattccttctaacgtcacatgcagcgctgaatcatatgtaaaagataaacgtttatttaaccagagcttcatcaatacatcacaatgagcatcaaatatcacaacccacacccctttaactctatacaaaaaggacctgtttggcttctatgctttacaggtccgtggtttttataattatcgcggctctacaattaatttaatggctgttcgctcttctccatcaatttgaatatctgtaaaagctgggatgcagattaaatcaaccccacttggtgcaacgaaccctcttgcgattgctacagcttttactgcttggttaagcgccccggccccaatggcttgaatttctgctgcgccgcgttcgcgcagcacgcctgctaaggcaccagcaactgaatttggattagactttgctgaaacttttaatatttccatatctagctcctccttattctttacaatgtatgatgagagatcattagaccaatgacttaattgatttcaatgttactatattcacgatatgtcaaacgtattcctgcttgtttttcctaaatattcaaaaacttatatttctacacctttcttttttctttttacgtttttgacaaaataaaaaagccaacgtatcgtctttcgacacattgactttttccctttattcaaaaaacggatggtcttcgttaattaaaattcgctctgtttttgttgctttccccgtcttttgatcaatatcgataacgattccactaagctgcgttcttccttcttttggcacttcaaatcgaacaggaagagacgttaaaaaacgcttaataacagcttcgcgctccatccctaaaatgccgtcatatggtcccgtcattcctacgtcagagatgtaggctgttccttttggcaatatacgattgtcagctgtttgaacatgcgtatgagtgccgacaacagcgctgacacgaccgtccacataccagctaatcgcttgcttttcacttgttgtttcagcatgaaaatcaataaaaatgagcggagtgcgctgacgtgcttcttcaatcatttcatccgctttttgaaatggacaatcaagcggagccataaacgtgcgcccttgtaaattaatcacggctacctcaagctgattgtacgtaaaatacgtaattcccttgccgggtgtaccttcaggaaaattagctggacgaacaagattttttgcatcgtcaataaaatcaaaaatttcacgtttgtcccacgcgtggttaccaagggtaataatattagcccctgcttgcaagaactgacgataaatcttttcagtaatgccttttcctgaagctgcattttctccattcacaattgtaagtcccggagagtattttctttttaatcttggtaaatattcttcaaccatttcacggcctggagaaccaactacgtctccaataaataaaattctcatgtaaaagctcctatacttcattcttaatctgcatcttcatctctacgaaaaaaaataaagtggcgaaacgccacttcatttttattttgcatactctactgctcttgtttcacgaataacggttactttgatgtggccaggataatccagctcatcttcaattcgttttcggatatctcgagcaagtcgatgcgcttctagatcaccaatcgtatctggtttcaccataatacgaacttcacgccctgcttgaatcgcaaatgatttttcaacgccttcataagactctgaaatttcttctaacttttcaagacgacgaatgtagttttctaatgtctcactacgagcacctggtcttgcagcagataatgcatccgctgctgcaactagtacagcaatgattgatgttggttctgtatctccatggtgagaagcaatcgcgttaataacaaccggatgttctttatactttgtagctaattcaacaccgatttctacgtgacttccttctacctcatgatcaattgctttaccaatatcatgtaacaatcctgctcgtttggctaacgtttcatcttcacctaattcagcagccataagtcctgataaatgcgctacttccattgaatgtttcagcacattttgaccatagcttgttctgaattttaagcgaccaagaattttcatcaagtctgggtgcaacccgtgaacaccgacttcaaacgtcgtttgttcaccaacttcacgaatatattcgtccacttcacggcgagatttttcaaccatttcttcaatacgcgcgggatggatacgaccatcttgaacgagtttatcaagtgcaattcttgctgtctcacgacgaattgggtcaaatcctgataaaataactgcttctggcgtatcatcaataataagatcaattcctgtcaaagtttcaagcgtacggatgtttcgaccttctcgaccgataattcggcctttcatttcgtcatttggcaagttaacaactgagacagtcgtttcagcaacatgatctgctgcgcaacgctgaatagcaagtgaaagaatttctttcgcctttttatcggcgtcttcttttgcacggttttctgtttcttttaccattattgcaatgtcgtgggaaagttcattttcaacacgatctaaaataatcgctcttgcatcttctcttgttaagcttgaaatgcgctctagctctgtttgctgtgcacgtactacttcttcaactttgctttccatctcttcaatatgctgttgtttaacagtaagagaatcatctttcttttcaagtaacgcttcacgtttatcaagtgattcgtctttacgatcaagattttcctctttttgcattaatcgattttcttgtttttgaagttctgctcgacgatcacgaatatcttgttctgcctctgtacgaagctgatggatttcatccttcgcttctagtaaagcttcttttttcaaagcttccgcctcgcgggttccttcatcaataatttgttctgcactagactttgctcccgcaattttagcttcagcaatcgatttacaaacaaaaaagccaacaactgcaccgacgattaggccaagcaaagcgaagatgattgtattagtatccatcatttcacctccccttgctataaacttgtaagttttaaatttcatgtcggcatgtacatcgtattcacctttcaatatacacacaaaggcttttaaacgctaaaatgttttaaaaagggaaaatatacatcttaattgtaaatctgtgcatttttattgtcaagcctgcctctacagtatatattgaaatttcgtatgttacttttctagcattaacaatttttacaaaaaaaagaccccttctttgaaatagaggagtctttttttatctcgcagcaaattaaatatttaaatcgccttgatcgtcatcctcaggagctggctctccatcttggtctaaaccatgatgttcacgcacttgtcccgcaatttcctgacgaatatcagtattttcttttaagaattgttttgcattttcacgaccttgacctagacgctcgtcattatatgaataccaagatccacttttttgaacaatatctagttcagaagcgatatccaaaatttcaccctcttttgaaataccttctccgtacataatatctacttcagcagcacggaaaggcggagctactttgtttttcacaactttaattcttgttttgttacctacaatatcgtttccttgctttaactgctctgcacgacgcacttctagacgcactgaagaatagaatttaagcgcacgtccaccaggagttgtttcaggattaccaaacataacgccgactttttcacgaatttggttaataaagatagcgattgttttagacttattgatagctccagatagtttacgcaatgcttgagacattaaacgagcttgtagacccacgtgagagtctcccatttctccttcaatttccgcttttggcactaatgctgctactgagtcaacaacgataatatctactgcaccgcttcgaactaaagcttcagcgatttctaaagcttgttctcccgtatcaggctgagataataatagctcatcaatattcacacctaatttttgagcatatacaggatctaacgcgtgctccgcatcgataaatgcagcctgtccgccctgctgttgaacttctgcaatcgcatgaagagcaactgttgttttacctgagctttctggaccatatacttcaactacacgtccacgtggatatccacctacacctaaggctatatctaacgctaatgaaccacttggaattgtagaaattcttttttccgtttgttcacctaatttcataattgaacctttaccaaattgcttttcaatttgttttaaagccatatcaagggctgcttgacgatcgttcactcaatttcctcctctatctctttgaaatcatctataaactgcaaacttactacgatgtagtagcaatgtcgaattaacaactttctataacttactatactagtttttgagtcgtttgacaagcaaaaagcgaataaatgttcgtttgttattttataaaaaaaaggctgttttggaaaaaccaaacagccttttttctttatttctttatcatctttaatacgtaatgacagccataattaaccgttcgtgaacgaatcccctggcggcttccagatagctgcaggctgtaaacttgaggagcttgatctttataggctacccctatatatactgttcctacaggatgtccttcttgtttggagggtccagctacacctgtaaacccgatgccaatatccgttttgcataactgttgaatacgctgagccatttcagccgcgcactgctcgctaacggctccgtactgattcagcgtgtgttcgctcactccgagaatattttgcttgatttcataatgataggcgaccaggctgccttttacagcttctccagcacctgaaacagatgttaaacgttcgctgaataaaccgccggttaaactttcggctgaagcaatcgttaatccttgtgccgttaattcttttaccaattcattatgtaaagaagttgcttcgtatccatataaatactcgcctacgcgctctgaaatggttttttccatttcgtctaacatgcgctgtgcttcagcagcatcagcgtgcttagcagttaagcgaagcgtcacttctccatctcctgctagcggcgcgatcgtcgggttggtttgcgcatcaagcaaatcttcaatttccgtctcaagctgtgattcccctattccgaaaaagcgaagaacgcgtgattcaatactttcttttaattcaagcttttgagctaaaaattcttgaccatacgattcatacattggataaagctcttttggaggcccggggaataacatatagtgttttccctctaccgtaagccccatacctggagccattccgtaatcgttagggagcactgccgaaccttctagcacaattgcctgttttttattgttaggtgtcatgatacgatttgactgtttaaaataggcttcaatgctttcaagtgcttctgcatttgttgtcagctctactcctagcacactcgcaattgtttcttttgttaagtcatcttttgtaggaccaagcccgcctgtgaaaataattaactctgcacgcgtttgagctgtagcaatcacttcttttaagcgctgtgcattatctcctactaccgtatgatagtaaacattaattccaagttcggctaattttttcgataaatactgagcgtttgtattggcaatttgtccaagcagcagctcagagccgactccaataatttcagcgttcatcatatcatctccatcttacttattttgaattaacaaaagcctgtttgtttttagcaaagtagtcccagcctgaaataaccgtaaaaatcactgagatccaaagcattacgctagcaaatggaatggaaacccattcaaaaggcaagttatacaacagaatagctgaaatagctaaaatttgagtccatgttttaattttacctaacatatttgctgctacaacttccccttcccctgctagtacaagtcttaaacctgtgatagcaaattcacggctaataatgatgatagcagcccatcctgcacctgcaattaaatctaagtcaacaatagctacaagcgcagctgaaaccaatagcttgtctgctagtggatctaaaaatttgcccaagttcgtgactaaatcgtactttcgagcatagtatccgtctatccagtctgttgtagatgcaataataaataatgctgcccctaatagatgagcgatcggaatctcttttcctgccgcctctactgtgccaaatggtagcggcaccaacataaaaatgaggaatacgggaattagaaaaatccgcgaaatggtaatcttgtttggtaaattcacttcttctgcctccaattactgttacaaactgaaagcgtgcaaacgaagttgtttgcacggctttagttttattatagcgtgaatgagtgattaattcacatattatctttatttacaccctgatcactttttaaaacagggtgtttactgtgcttctgccggctgatattgaatcgttacaacttgtcgaacttgcttggatgaatcaaacggcaagtcaaccgcttttccatttacttttaactctaccccaggtgaataaccgatgttgacacgagcttcagtttctttcgtcaaatcaaattcttttgtttcacctttttttagaatggagctaaagaaagcatttccttttccattttttacatctaaccaagtatctgcttgagtggatgttacttctagattaaatgcatctgtaccggaaagagcatacgtagcacttctgcctgttttttgaacttccttgtattcttgtttaccgctgtctttcttttctttttcagctttttctttctcagctttttcttttgcggctttttctttttcagctttttctttttcttgttctttcttatcagcagcactttgttcatcttctgagttgctattgtcattttttgcagtagtttcattcgtttcttcctgcgtattagactgctgaacttcgctgtttggagcttcttgattagcctgctccttgtttttatccgagacgatattttgagcgattacccaaataataatcccaacaactacaactcccgccaccactagaacagttggaaggtagtcatatgcttttgaaactccttttgtatgctgaggaatttctttgcggctgcgaacgcgcgaaagctgctgcggcatgtcttctgtttgagttgaaggaatgtctgatttgtattcttcaaaaatagcatctgtgtccaacccaattgcttcgcagtattgcttaataaacgctcgtacgtaaaatttcccgggcataacctcataattgccttcttcaatgccaagtaaatagcgtttttgaattttcgttagtttttgtaaatcctctaacgacaatcctttgctttctcgttcttgtcttaacctttgtcctaactctgtcaatgctaacacctaccaattatgctaaaaatcaaacatcgataatccaccgtcttgaaacatttgaggaccttccattatttcatatgtaattttctcattggggtcgtttcttatttcaataatgtaggcaaaatcatctaacgaatactcggtattttgtacaaatacatccggatgctccacaatttttgtcgcgggtacattcattatttctcgtacaagctgccagtgcttttcattcgctcgttttgtcgatacaatcccgtcaataataaaaatattatcggcgttgtattcgtcagcaataagctgactgcgaatcgtttgttttaagagtgtagaagacacaaaaagccaccttttgttcgcacatacgctagctgctacaatggattcggttttgcctactcgcggcatacctcgaatgccgataagcttatgaccgtcttgtttaaacagttccgccataaaatctacgagcaaacctaattcatctcttacgaaacggaacgtctttttatcatctgcgtcccgctgaatatagcgaccgtgacgcactgctaacttatcacgcaatttaggcggtctcatttttgtcacaatgatattatccattgttttcaaaatagattcaagcctgtctatttgctcatgtgaatcacagcgcagcaataatccacggcgaatatcatccactccattaattgtgacaatattaattgacaacattccaagaagcgatgaaatatcacctaaaagacccggacgatttttttgtatttgatattctaaataccactcaattttctccatcaaacccctcccatttcttggctggccttcgagaggtgccccctttttttcacctagtttaactataaatgatttccattatattataaaccctaaagacaagtagttctacatttgttatgtatgtaagcgcttatttatttgtactatttatttctaagaaaaaaggagctctcacacacggtgaattagctcctttttagaaacgataacttattttactgatccgttattttgaactaatttcaccatgctgctcgcaatcgcatgctgctcttctttagaagcaacgctccaaaggtctgctaaaattcgctcttgatcattttttgcatcaacttggtttgctaaatatccaccaatttgataagcaagatcatgaataacttcttcttgcattccttcgttttgcgcatgatgtaaacggtcgcctaaaaaatctttccagctatcccagttttctaatactgacatgagtagccctccttaaggtttattcatatcatagtttgtaccttgtttttgattttatgcacactttatatgtaccagccgccattaaccgataatatttgtcccgttatgtaggaagctcgtgaagatattaaatatgaaaccgcctctgccacttcttttggatatcctattcttcctaaagggatctcttcagccagctctttgacctcttcttttgaatagctggccatcatatccgtttcaatcgctccgggcgcaactccatttactcgaaccccacttagtgcaacctcttttgccaaagcttttacaaatgtattttgtgcacctttcaccattgaataaaggacttcaaatgaagctcctgtaagtccccaaatggaagaaatcatgatgatttgtccgcttttagcactaatcattttaggtaataaagctttggtaataacaaagggagccgtgatgtgaagatagatcatttcttcagtttcttttgccggagtatctgtcattaacccgctaacgcttcgtccgctgttatgaataataacttctaccggaacaataatttcctctaaaaacttctccactccctctttacatgataaatccgcttgtaccgtaaacaccgtttttaccttttcagcaagctcatgtgcaagcgcctctattctgtctcttcgttgatggtaatgcaaaataagcgaatatccatcctcagccaattgcttagcaatcgctgtgccaattcctccgcttgcacctgtcacaagggcaaatttctccataaccttctctcctttacatgcaaaaaagctgatgaacatcagcttttttggcaacaatcatctttatttaggtactacttcacaaaccgtaaagttcttttcatcaataatctcgtttagcacatcttttatttcgttcaccttcagtttttccagcgtttcaacaatatcaaataaattcatatcattaaatgcatagcgtgtaaactgattagcgataaactcaggtgagtttaatgaacgtaaaaatccgccgattttctttttacggatacgctcaagctcctcttctgttagtgattttgttttcatttcaagtaaaatttgtttaactcgatcatacagctgctccggttggtccgtatctcctccgataagagcaaaaccaaatcctctttcctccgtataatcataagcaaatgtttcatcaatgagcccgtctgcatataactcctcatagtacgaagagctttttccaaatgcgtaatctaaaataatattcattgctaactcatatttaagcatttctccacctgaacgctgcggatttttcgcttttagacccaccatacatttagaagactgcaccggcatttttagtacttgtttttcttgatccaccgtttcaggctcttcgtcaaaatgacgctgtatgtcagagatttctttataatcttttttctgctgattgtctcgaacttgcttcattactttttccgcatcaacaggacctacaatgaacaacagcatgttgcttggatggtagaacgtttcatagcatgtatacagcagatctttattaatatgtgaaatcgattcgatcgtgccggcaatatcaattttaacagggtggtttttgtacatattttgaatggtgccaaaatacaagcgccagtccggattgtcgtcatacattgtaatttcttgaccgataatgcctttttctttttcgaccgttttttctgagaagtacggctcttgtacaaagtccactaatgtttcaaggttttcttcaaaatttgacgtacagctgaataagtaagctgtgcgggtaaaagaagtaaatgcattggccgaagcgccttgtttactaaactgctgaaagacatccccgtcttctttttcaaataatttatgctctaaaaagtgtgcgattccgtccggaacttttgtcatttcattttcatttagtggtacgaattgattgtcaatcgatccgtagttcgttgtaaaggtagcaaacgttttgttaaactccggctttggcaaaatatatacctgcagcccgttatccattttttcatgatacagctgttcctgaagctgcgaaaattcaattttctccattttcttcaccgcccgttcctgttaagaaataaattgtatccatttcaattttctcagccactttaataatttcctgcttagataccgcatcaatatgctttaagtattcgtcaattgaaatgtctttgcctgttaattcattatgatacataacctctactagtcctcgtggagtatccaccgtttcaagcagctgattgtgaatgacggcttttgtttgagcgatttcgccgtctgtgaacgacccttgcttcatctcctgcatttgttctttaataatggtcacggcttggtcgtaatttttagcatcaatacccgacatgaccatcagtaatcccttatgactttctacccttgaagcggcataataggctaagcttgctttttcacgcacattgataaatagcttagaatgtgagaaacctccgaatataccgttaaatacttgcagagcaaaatactgtctatctccgtatacaacatttgtgcggtagccaatatttaatttcccttgttttacttcttgtttttccactacttcatttacttttgagatatctttagacgtaatagaatcttcaatgtctttttgctcgcgctttggtaacgtaaatgtttcttttactgtttgtaaaacctcttcgacttgcaaatctccaatagcataaaggtgaatggcatcttcttttaacacctgctgataataggcgtacaaactttcacctgtaatttcttccacgtcgtcaatttgaccgtttacatgtaaagagtaaggttcttctttacacatttcttcgactagtcttaaattagcatagcgcattttatcatcaaatacggcttgaattctctgacgaagcgaacgcttttcttttgtcataatatcctttaaaaaagagtccccttcaactgctggctttaataaaatatcgccaagaagcgctaacgctttttgcaaaagcggagttgaatctttcaaatatttttcattcgctatatcaatgcgaatcgtaatatcgtggttatcacctttttttgttaagtctacttgtaaagtagcaccataaagctcatctaaatatgtacgaagctttgtcgtagacggcagcgactcggtagcgctttgaagcacataaggtaaaagggcacgcattgtcaccgttttcttatctaaaggggcatttagttttaaaatgaacgtgtttgttttgtacttagctgtttgaatggtatgaacagtcaatccttctagttcatgtttttgttcagtcaataatttcatatataaacctccttttaaattttgatgtattaactagacaatacttctattttgaatctttaacgctaattttagtcttataaccactatatcgaattcaaggaaacattttcaagtaacttgccgcgcgcttcctcatttcttttcatattctttctctcaatgaaaaaaaggcggagaaaagaatatgattcctttgtctccaccttctatatttatccaactttagtcattgttagacctcgtatagaggatttattagcggcggcctttttcataaggaacgcctagcgctttaggagcctcagcacgtcctacaaaaccagtgagtgctaagattgttaatacgtacggtgcaatggttaaaaggacggatgggatatcttgaataaccggaatctgagctcccgtgatactcaaagactgtgctaatccgaaaaacatggctgcacctaaagcaccaataggatgccattttccaaaaatcatagctgcaatagcaaggaacccttgtccagcaatcgttcccgctgcaaaatttgtagcgatagacgtagcatacaccgctccgccgattccagcgaacatgccggaaatcataacgccaacgtaacgcattcttacaactttgatccccatcgtgtctgctgccattgggtgttcaccaactgaacgaagacgaagaccaaacggcgttttataaatgatgtaccatacagcaaaagctagcgcaattgcaatgtaagacgtaataggaacattcgaaaacagaattttgccgattactggaatgtctgatagacctggaatacttactttatcgatacggaattggataaaatctgtttgtcctttcccaaaaatctttttgattaaaaagattgaaagacccgcagctagaaaattcagcgctacaccacttacagtttgatctgcttttaatgtaatacttgcaacagcatgaatcagcgaaaacacagcgcaaacaacagccgcaattactatcgctacccacggggcccaagcacctaatgaatcctgaagtaaaagggttgaaacaatacctgtgaacgcgccaaacatcatcagcccttctaatccgatgttcacgaccccggaacgttcactaaatatccctccaagcgcggtaaagataagcggtgcagctgaataaagcgccgctggaataataatggctaacacctctaagaagttcattttgctccccccttgcctgcacggccaagcacccagcgaattaaataactagatgcaacaaaaaagataataagcgcaatgacaatttgaattaattcagacggtacccctgtcataaagttcatttgaggagccgccgtttgcaatcctccgaaaaagaatgaagctaataaaattccaattgcgctgttagctcctaaaagggctacggcgataccgtcaaaccccgtacccgtaaacgcagtgaatgtgcccatatactgaaatgttccaagcccttccattgccccggcaagcccggcaaaagcgcctgaaatcgccatggataatacaatgtttcggcctacattcattcctgcatactgtgaagcatgttgattaaaaccaacagctcttagctcgaagcccttagctgttttattcaaaataaaccacattacgacggctgcagcgatggtaacaagaatgccgtaatgaaggcgggagttattggttaactgtgctaaaaagcttgatgctaaagatgccgattctttaatatcatacgatttttcattacccgcatataaatacgtacggattaagctgctcgttgtataaagggcaatatagttcatcattatggaaacaattacttcatgaacatgaaattttgcttttaaaaatcctggaataaacgcccaaactgctccagctgcagctgctgctaatacagctaaaggaatatgaatgaccgctggtaaatcaaacgcatacccaacccatactgaagccaaccagccaactaaaagctgtccttctactccaatgttaaagagaccagttttataagcaaacgcaaccgcgataccagccagagcaagaggagtcatggcacgaatcgtttctccaatggcttttggcgttccaaacatcccgtcaaaaagagattgatagccaagcattggatcatagccgcctagtaacataataaccgctccggcaatgagtcctaatatggccgatacaacagggatcaaaatcatcattacacgttcatttttcacaagtttattcatgctgttccacccgctttctcacgcgtaccgcctgccattaataagcctaactcttgttcattcgtttcttttggatctacaatgtcgactattttcccttcataaataaccgcaatgcgatcgcttaaatttattacttcatcgagttctagtgaaacgagcagcactgctcgtcctttatctcgttcttcaatcagctttttatgaataaattcaatggctcctacgtccagccccctcgttggctgagccgcaattaatagttccggactgcggtctacttcacgggcaataatggctttttgctgatttccgcccgatagcgatcgcgcttgtgtaaattcactaggcgttcgcacatcatattctgcaattagttcttttgcctttttatacatctctttataatttaaaatacctgatttagacatcggcttttgataatacgtttgaagaccaatattttcacctattgtataatctaataccagtccgtgcttatgacgatcctgcggaatatgtcctattcctgactccgtaattttacgagtggataacgtagacaattcttgattttttaatgtgatcgagcccgactttatttttctcagacccgtaattgcctcaatcagctctgtttgaccattaccatctacacccgcgatgcctacaatttcgcctgcccgaacgcttagatcaagtgaacttacagcctctactcctcggctgtcttctactactaattcttttattgttaacacagcttcttttggagtcgctgttttcttttcagttttaaaatgcacttctcttcctaccattaaagcagcaagttcatcagggttggtctcttgcacatttaccgtgccaaccccgacgccttttcggataattgtacagcggtcacacactgacataatttcttttaatttatgcgtaattaaaataatcgactttccttcttgaattaactttttcataatttgaattaattccgtaatttcctgaggtgttaaggcggcagtaggttcatcaaaaataagaatgtcagctcctctgtaaagcgtctttaaaatttccactcgctgctgcatgccaactgagatatcttgaatcttcgcatatggatctaccgataatccatattgatttgaaagctcttgaatatcttgagctgcttttttaatattaatttttcccgttcgcgtcggttcgtttccaagaataatattttctgttactgtaaagttttgaacgagcataaaatgctgatgaaccatcccaattcctaagtcattcgctacgttagggtctgtgatgttgacttcttggccgtttacacgaatctgccctttttcaggctgataaagtccaaataaaacgttcatcagcgttgacttacccgcaccattttctcctaacaaagcatgaatttctccctttttcacttggagtgtaatattgtcattagcgacaataccgggaaactctttgcgaatatctagcatttcaataacatattccactgctttcactccctattcctgcctgctacaggattctgtcttccgttttttggctatgaaaaaggctagttttcactagccttttatactcatataatcattgcttaacagacgtcagcttattttttaagcgttttttcaaactctttaaattctttatccgtttgaggcactgtaatgtcaccgtctagaattttttgcttatactcatcaactgcttttagcgcatctttgcttacattatcttgtgatggagcaattcctactccgtcttcttttaagccaaacacaacttctttaccacctgggaatttgtcgtccattgcttttttagcaacatcttctacagccaagtcaacgcgtttaaccatcgaagttaacgttacgttttcaggcataccttcttcatgctgatcgcggtcaactccaattacccaaacttttttgtctttcccgccttttgaacggtttttagcttctgtaaatacgccgtttccagtaccgccagccgcttgataaataatatcagcgcctttactgtaaatcgtagaagcaatagccgaacctttttctggagagttaaaactttctgcgtattgagagataacttcagcatctgggtttacagatttaacacctgctttaaatccgttttcaaacttcttgattaatggagattcaacgcctccgataaagccgattttgttcgtttttgtttgtttagctgccactacccctactaagaaggagccttgctcttctttaaatagaatgcttgccacgttatctaagttctctgactttagcgtatcgtctactaatgcaaagttagcatcagggtactgctttgctgcttttttaatatcttcttttaataaaaagccaattccatacgtcaagttatagccactctcagcaaatttagaaagattgctctcgtattcagatgcttttgtagactgcaaatatttatatccagtcccttcatcaagtccgttgtctttcccgaactttgtcagaccttcccaagcagattggttaaacgatttatcatctaccccgcccgtatctgttaccattcccactttaaaatctgccgcttttttatctccgccgctcttgcctgcgtcgtctgagccacacgcgcttaaaagtgttcctgccgctaatactagtgataatgcaagtcccgttttacgttttaacatgttttaaccccctgaatagttttaaaagtataaagccaattttctatttcgtccttgtgacctacatttgacacctccttaaaaggacaatgttaaacagttgtaaattttctgacatttaaacacaaaaaaactagacgcgtttacgcagtacttggaaactgaattgatctgctttaaaataattgatggaatataaaatgggttcatcatgctggtcataatgcatttgtttcagtacaagcaaagcggtttctggttcgcattgtaaaataggagaaactttttcatgatagcctagaggctcaatgtttgccacggcgtatgaaatgtgttttcctgcttgtttttcaagaatttctagcaatgactcttgtctatattcaaaattttcaggcaatactttttgaggaaccttgtccatgcaatataccaccggctctccgtttgccgttctcacccgttcaacaaataaaatttgttcatcttccccgcaagcaaaacgtgttaaatcattttcagacaactcttgtatttgagaagataagaagattgttccagccttcataccggcttgttcaatcatatgtgttatactatttaattgctcaatccctgacaaaaaagtaggcttcgtgttgacaaatgttcccacgccgtgtctgcgaacaataatattctcttcttctaatatgcgaagtgcctcacgtagcgttgcgcggctaacccctagctgctttgataaatcaaactctgaagggagtctttccttttctttaaaaattcctttttctatattttgtttaattttatcaatcacttgtagatacaagtgccgattatccgcacgtatagacatcactcttcctccatattaaaaagtcatcagacctctgatgttcgactacttaatcgaaaataatatatcatttttcgacagataaataaataggttatattaattttttattaaaatttttattatttttttaaaaaaatgaatttttgttattctttaatgtcagcatacctaacaacctgcttttcttctaatattagataaaaaccaaacattttagtcattaaattttttaacattcgtttttatttcatttatttagcatgacatatttttgtatgatactattcttcctctctttcgtttcataaaaaagatgacttgcacatatgcaagtcatcttttttatgaaaattattaagatccaacatcctcattttgctgagaaatcaggacggaacgcggcttacttccttcataaggtcccaccactccacgctcttccattgcatcgatcaagcgtgcagcccggttatagccaattcgaaagcgtcgctgcagcatagaaacagaagctgtttgcatttctgctacaagctgtaccgcttcgtcatatagctcatctgcaaaatcatcaacttgttcaggagcatcggttggaatcatttcttcttgatactgcgctttttgctgtgcaattacaaaatcaacaatctcttctacttcttcatctgataaaaaggcaccttgcacacgcacaggttttgaagctccaacaggcatgaacagcatatctcctcttcctagaagcttctcagctcctcccatatctaagattgtacgagagtcagtttgtgaagatacactaaaagcaattcgggaaggaatatttgctttaataaccccagtaataacatctactgatggtcgctgcgtagcaataatcaaatgaatgccggcagcacgagccatttgagcaagacgtgtgatcgaatcttcgacgtcagacgaagcaaccatcatcaagtcagccaactcatcgacaatcaccacaatataaggaagagtcggctgtttcgcatcggcgtctccatcatcattcatacgttttactaaatcgttatatccttcaatgtttctcgttccgctgtgtgaaaacagctcataacgtcgctccatttcatttacaactttctttaaggcttgagaagcttttttcggatcagttacaacaggagccaataaatgcggaataccattgtacatattgagctcaaccattttagggtcaatcatcattaattttacttcatgaggctttgtcctcattaaaatactaataataataccgttgatacacacactttttccgcttcctgttgcccctgctacaagcatatgaggcattttattaagctctgctagcacagcttcgcctgaaatatctcttcctaaaccaactaatagctttttatcaggtcggttattttcagttgcttcaagtacttctctaagtgaaaccatcgctacttcttcgttcggtacttcaattcctaccgctgatttcccgggaattggagcttcaatccgaatatctttggcagctaatgcaagtgctagatcatcacttaaattgacaatcttacttacttttactcctacatcaggatatacttcatattttgtaacagctggtccaaggtgaacttttgccacttttgcttttacgccgaaactttgaaacgttttttcaagtttttcggcatttttataaatgtttttatgctcttttgcctggttgcttttctttggcatcgtcaatagcttgataggaggaagctcatactctttattttccgtttcagtaaatgtaatcataggagctttttcttcttcctgttccttttgcggccttggctgttgcggtgcagtagctacaggcttcgattccataaccggcggcaccggagctataggagcagcaggaggttgactagactcttcctctccgtagtcaaagtgttcaataattggaggcgaaggtgcttctacttctatttccatgctttcttcaggttcttgaacagctttttcttggcgtctcttttttgttgttttaggggcttttttctttttatgtttccacgtctgaatatcttgccagccttcttttaactccgttgttaaaaaattcactagaggtgacagaagttttaataccgtttcgtgaagcgaacgtccggtaataagcagtaccccaatcacaataagcaaggcagcgataagttctgttcctaagctatcaaatagatagtagaacatggcaaacataatagctcctatcatccctccgcctaaatcgctgtgatttgattgacccgttgcttcgagcatatacaaatcccatgtgttcataatgacagacggatctgtaaacgttccgttttttgataaattttcaaataacgtaacatgactaaacagtaaaatagataaaataatgagatatgtaccgataagctgccgcgtcactaaaggaggcatttcccttttccaaataatataaacagatagaatagccattccgattaaacacagcatataccattcgccaataaataagcggaccactagtacaagggcctgtcctacagcaccaagtcctgccatggcaattaacgttaatgctaataaaaataagccaataagctcaaagcgcaatatacgtttccattcatccttttttatttgacctcttcgttttttctttgccatttttccactccaatcaacgtccaacactctatgttgattttgtttcttttatcagttgaataaaaaagcagccaatacagcggctgccttcttcgtcatattcattataccatattcaccataattatactgaaatccttacgacaaaatttgaccaggataataattttcattcaaataatcttgaggattcgtgcttaaaatcctcacaatttgctgttgcttttgttcattttcttcaacaataaccggaattccattatggttaataagctttggctgagattgttcttgatgataagactgctgaaagatcagttcttgcggcatcattgtatacaaaatcattgcagcagctgctcctcattctgacgtccttgctcaatcagttcattcaattttttgatcgcttgagcaactccgcctacttcgttaattaacccgtatgaaacagcatctccgccaactacatttgtcccgatatcgcgcgttaagttcccttttgaaaacataagttctttaaacttttcttctgaaatatgagaatgttctctcacaaagttaatcacgcgctcttgcattttatctaagtattcaaatgtttgcggtacaccaataacaagacctgttaagcgaataggatgaatggtcatggtcgctgtaccggcaatatacgaataatcagttgaaaccgcaattggaacaccgattgaatgtccgcctcctaacacaatcgacacagaaggcttggataacgaagcgatcatttcagcaattgcaagccccgcttctacatctccacctacagtattcaagataataagcaatccttcaatttttggattttgttcgatcgccacaatttgcgggatgacatgctcatattttgtcgttttgttttgaggaggcagctgcatgtgcccttcgatttgtcctacaatcgttaaacagtgaatattagaatcttggggaagctgagccacgttggtctgtcctagttgttgaattttatctaatattccgcccttgctttcttcatttttattaggctgctgaggcgcttcatcagaatgtaatctttcgttattttcaaacatattctagctcctttcacttattgatagtagtagtatgaacttctcatagttattacatccgcatcagctgcaaataaaaagccttcccaccgggaaggcttcacattagatttccatgataatcggtaaaatcatcggtttacgacgggttttttcatataaaaattgatttaaactttctctcatttttaattttaatgaagaccactcgatcactttgtcttccatacacttttctaaaatttgctgaacaatcttcgttgcttcttctaaaagcttttctgattctcttacatagacgaatccgcgcgagatgatttcaggccccgctactaccgttttttggcgcttattaatcgtaactactaccgttaagattccgtcctgtgacagcagcctgcggtctctcagaacgatatttccaatatcaccgacgcctagtccatcaatgagcgtatttcctgcttgaatagaaccgctagggtacatacgagcatctttaaactcaactcgctcacctttttcaagcaaacaaatatgatcttctgatattcctaattgaccggccagctttgcataagctttttgttttcgatactctccattcacaggcatgacatatttgggctttgttaagttaatcataaattttaattcttcttgactgccgtgtccggaagcctgcactttcttctgagcaaacactacgcttgctcctaaacgaaagatgacgtcaattgtttttgaaaaggtcgtttcgtgccccgccacaggtgtagcagccagcaggaccgtatcatcttgtttgatttgaataaatttatgggactgtttagccattcgagtaagacctaaaatcggctctccgtgatgacctgttgttaaaataaccgtttcatgttctggaagatcttttagcttttgcacaggaacaattaaatcctcaggcagctgcaaatgtccaagttttgctgcaatatcaatgattttcagcatatttttttccataacgatcaggttacggccgtgctgatatgcggcatgaatgatttgctgaatacggtgcagattggaactgtatgcagcaacaatgattcgacctttgcttttataaaaagcgtcggtaatattttgtccaatgacggcttcggaaactgtatagcctggcttatccgcatttgtgctgtctgaaagcaaacacaggacgccttgttccccaatggcagccatttttccaatatcagcgctttgaatgctgactgaattttgatcaaatttaaaatcacctgtatatacaatcgcaccttgatttgtttgtaaacaaataccgactgaatcttggatgctgtgctgcgttctgaaaaatgaaatatctactccttcaaacgataaaaccgttgacgaagtgataggatgtaaagcttcatattttttaattccatattcttttaacttttctttgataagtgctagcgttaattctgtaccatatacaggcacatccaatttttgaagtataaagggaatagcgccaatttgttcttcgtgtccatgagtaacaaatatgccttttacgttctgctgattttctactaaatatgtaatgtccggaatgacaatatcaattcctaacatttcccctcccggaaacttcgatcctgcatctaacacatatatgttttcattgatttccatcacatacatgttttttccaagttctccgactccacccaaagctgaaattttaatattttctgtcttttctagtaccataagctcctcctacttactttcacccgtacaatttcatttgcttacattataactgaagtaagaattggaatacaagaaatttcattcgtctatttccgtcatctgctcttctattatcttataaaaaaaaaacgtctcttcatcgactcgtatatacggtcaatgaagagacgtttaaaaaacatacttatagcttatagcgtatttaatgtgctgactaacgtttggcgttcttcttccgttaacggaactaaaggtaatcgtaccgatcctacgtctaatccttttaactgtaaagccgttttaacaggcgttggacttggagctgcaaaaagagatttcataacaggcacaatacgctgatgaatttttgctgcttccttcggatttcctgactcatacagcttaaccatctcttgcatttcattcccaataatgtgagaggcaacagaaataataccagttcctccaatcgctagtaccggtagtgttaaaccatcatcaccgctgtataaagcaaaatcatcgcttgtttgtgcgataatagctgtcattgcgtcaagatctccgcttgcatcttttaacgctacaacatttggcagttcagctaggcgtacaattgtatcaacagacatattgatcacggatcgccctggaatattgtataacatgacaggcagctctgtactttcagcaattgttttaaaatgctgatataagccttcctgattcggcttgttgtaataaggtgctacaatcataatcgcgtctacgccgatttcttctgcctttttcgttaattcaattgatgcatacgtattgttgcttcctgtaccagccacaacaggtacacggccgtctactacctttactgagtggcggaacagcgccagcttttcttctgttgaaagcgtaggagattcacccgttgttcctgcaataaccaacgcatccgaaccgttgctgattaaataattaataagctgcgttgttttttcaaaatcaatatttcctttatgatcaaaaggtgttaccatcgctgttgcgactttcccaaaatcaatcatgttttcactccttgaaattgcattatccctattcatgtaatgaaccgttagcttatagctaacggaacatgtagtttatctcttttgcggtgcttttgacaagtcaaaggcaccatgaagagcattaacggctttctttaaatcctcttcttttacaagcacccaaatcgtcgtatggctgtcagcagattgtaaaatctgaataccttcgccagaaagagctgtaacaattttagatgtaacaccaggcacccctgcaattcctgctccaaccgttgacactttggcacagttgcgaataacagccggctcataccctagcgcatgaagcacatcaatcgctttgtcagttgcttcatctgttaccgtatatacaacacccttcggtgaaatattaataaaatctacgctgattttttcttgtgccattgctttgaatacttctgcttgcgtatcataatggccttctttactaaaaactttaatttgagtgacgttggatacgtgcgcgatgcctgttacaaggcgttcttgcacatcacttccacgctgctgtgcttcaccttgagatgtaacgagcgtacctgttgaatcagcatacgtggaacggacgcgcatcggcactttggcttgcatggcaatctctacggcacgtgggtgaactacttttgcaccttgataagccatgttgcatatttcgttatatgtgacaacggatagcggtcttgcatcttctacaatacgcgggtccgctgtcatcacaccttctacatctgtgaaaatgtcaatataatcagccataagggctgcacctaaagctgaagcagatgtatcgctgcctccgcgtccaagcgttgttgtatcaccttcagtagttgccccttgaaagcctgttacaaccactacatcgtattcttctaattcttttaacaaacggtcgcatttcatttctagtatcttggcattggtaaaatcatcattcgtcacaaacccggcctgtgcaccgtttaacgctgtagctttaataccattttcgtttaacaaattcgtaaacactaccgatgaaattaattctccgcatgccataagcatatcaagctcacgtttattaagagacgctttatttccatcaacaagtgaaagcaatgtatccgttgcatacggctcaccttttcgtcccattgccgatacaacaacgactactttgtaaccctcacttaatgcattatttaaatgatagattgctctctctcttccttcttcgttacgaacggaagttcctccaaatttttggacgattattttcatacttacacctcatcatgttccgagacactctggttgcgcttattttactaagctaagcttaataagtgattctgcaatttgtacagaattccaagctgcaccttttaacaagttatcagaaacgatccacatatggaaaccgttatcgcgatctaaatctttacgaatacggccgacaaacacatctcgtttacctacacaatctgctggcattggatatacttgattttctggatcatcttgcaatacgataccaggtgcatcagccaataaatttttcacatcagctaccgttacaccgtctttttcaatttcaatgtacactgactctgaatgacctgttacaaccggtagacgaacacaagtagcagctactggcaattcaggcatgttcataattttcttcgtttcattaatcattttcatttcttcaaatgtaaaaccgttatcttgaaatttatcaatttgcggaatggcattaaaagcaatttgataatgttttttatctccaccaaccggtaaaatttccggtgtaaactctttttcttctaaaatagctttggcttgttcttttaattcattaattgcagcagcgcctgctccagaaacggcttgatacgttgatactagcactttagataagccgtatgtttcgcgtaatggctgtaatgctgcaaccatttgaattgtagagcagtttggattagcaatgattccgttatgtgcgtgtaatgcgtcttcattcacttccggcacaactaacgggacattttcatccattcgataagcgcttgtgttgtctacaacaattgctccgcgttttactgcctctggtgcaagtgcttttgaaatgctcccgcctgcactgaataaagcaatatctacgccttcaaagctatcaggagttgcttcttgcacaacaacttcttctccgttaaacaacacttttttaccagctgaacgagctgaagataataacgttaatttaccaactggaaaattacgctcctgtagggttttaatcatttgttgtcctactgcacctgttgctcctactactgctacatgtaattctcttgtcattttaataccgcctccaacaattttcaactactcaacatttatctgcatatactgactattttaacatattattatgcttcattgcgtcaaagaagagaagatttttaaaatcttctcttctttgagattgagagttctcttacagccgcagtattgaatagattcatgcaccagcaagaggcatatatgtcctatgactcttgaccgtcgcggaacctttcgacaataacaggctgaatctgtttattttcaagcgctgcgtagaccgtgtctgataacatcgtcatacgcgctaccattgaattcggcttaagcaccgggtcatcttgaccaaatggaataaaataaatatttttagtcgccattagcctcattaagtttacaccatttagccctagtgcgtcattagtcgaaattcccagtaccaccggcttattattacgaagcgttgctttagctgccatgagtaccggagattcagtcattgcattcgcaaacttactcatcgtattcccagtgattggggcaaccaccatacaatcaagcggaatttttggtcctaaaggctccgcttttacaattgtattgatgacggcgtgacctgttaattcctcaattttcttcacccagtcttctccatctccaaaacgagtattcgtggattgtaccgtgtaagaaacaaccggtaacacttctgctcccaagttaacaagcttttcaatttccggcataaccgcatcatacgtacagtgagatccggtcaagccgaatcctattcttttaccttttaatgacattattttttctcctctctcgcatccgcagcgtcttttaataaattcactaatacattagcgacaatctgacctgctgtttttggagccacaattcctggaagaccaggtgctaaaatagctttaattcctcgtttttctgcatagcggaaatcggttcctccaggctttgaagctaaatcaataatgagcgcatgggtcgggacattagataatgtcttagccgttaagatggggtatggaatggtgttaatacatatatcactatcagcaatttctttatcgagttcagaaagatagaaaggctgcaaacccatttcagcaatacgtgctaaatgttcagattttctagctcctacttttacattggcaccaagtgcagcaaaggacctcgccacgctcattcctactcttcctaaacctaggacagaaatatttgaaccgtgaatggtaaaatccgtatgttgaataacaagcatgatggtaccttcaacagtaggaatagagttataaattgctacatcatcacgctcaaatagctgaacgagtttacggtttgtcgttttgactaattcgtttaaatacccattgctaataccagaataaataatgcagtgctcaggcgtttttttaagtatttcttcagtcagcactactttttcatttgaaaaaatagtatctacttgcccttcgtgatttgttccaggcactggaaggatgatggcgtcaacatctgaaaaatccagctcctctatctgatatttcgtcgcacctgtaaaaccatgatctagctgatcaaaaccaataagagatgtttttgcatctaattgaattaattttcgaatgacttcaagctgcctagcatcaccgccaattacagctatgtgcaaatccgttaacatgtttcattttcaccttctttaacattaaatagatgtatccttcgcttaaaccatcgagatgtaaagtgctatcattacgccctagaatgcctattgcttttcttcaacatactatgtaaacacacaggaatcggtgaatctttatccctgaaaataaaagaaacgagatgcaggaagcatctcgtttcttattttgttgactgattgtttatgtcttctagctgctggacatttacaatcaccatatctgtaccaattttttcgatattcccccacggcactcgcacttcatctccttgttttcgaaacccaaaccacttcacagatggaataataagcgcattaatttgtcccgtatgttcattaatttcaagatctgtttgccctaaaatacccaaacgctctgctcgcttaacatctacaatttcttttccactcagttcgcttaatctcatagaatccctcctttcatctaatttattgaacaaccatgcaaaaaatgacaaaaaaataaggctggctcaattattttagccaaccttacttttactgtttaatttcctttaaaacctttaggtaaatctccactcgggcttattagcgaaagagcaaattcatctttgaaaatatctcgcgcaagaccatttacactatctttagtcacggcattaacaagatctaaaatctcatctaatgaacggtgatagcctagcattaactcattttttccgtttctgctcatacggctatttgtactttcaaggctcagcattaagtttcctttcagctgctctttgctgttagcaagttctttatccgtaatccctttatctttcaaatcataaagcgtttcttgaaccgtatcatataatacgtcgagctgatggcttcccgttcccccataaatcgtcacaagaccgctgtctcgataagaagaatgataagagaaaacagagtaagccaagccgcgctgttcgcgaacttcttggaacaaacgactgctcatacttccaccaagcacgttatttaatacaattaagctatatacatcttctccgccgattggcaaacctttaaagccaaggcaaaggtgagcttgttcagtctcctttttgcgcgcaatatgatttgtatggaactctggctgaacatattgatgagcggagtgacttgacgtatatgtaccaaaatagttttccacctgctgaataaaactttcatcaatgtttccagctactgaaataacgatgttttcgggaatatacatttgctccatatactgacgaagcgaatcaccgttaaatgtttttaacgtatcttccgttcctaaaattggatagcctaatggatgattgccatatacggcttttcctaatagatcgtgtacaatatcatcaggtgtatcttcatacattttaatttcttcatatacaacatttttttcacgagttaattcctcttcatcaaatgaagaattaaagaacatatccgccagcacatcgagcgcttgatctgcatgttcatctaatacttttgcatagtagcacgtgtattctttagaagtgaatgcatttacttgtccgccaatgcggtcgaagctttctgcaatttcacgagcagatcttgtttttgttcctttaaaaaacatatgttcaagaaaatgtgatacaccattaatttcagggtgttcacttcgagaacccgttccgatccacaccccaatggccacagatcgaacagttgggatattttccaatacaattcttacaccatttttgcacgtatatcgttttatcaagctagtgcctcccttttgcttatctcacttacttcttagtagaagaaggtattttcatcattcgttcttcatctagcattgttgacacatcgctaactttgaggcctttgcgttcaatatcggttaacaattggtcaagcgattcagccgttgattcagtcgggtgcatcagtacaatagctcctgggtgaatctttttcattactcgattaattaacacttctgaacttggcttttgccaatcgattgtatcaaccgtccacatgatggtactcatttttaactgagaagcaagcgttactacctcggggcgaaaactgccgctcggcggagcaaaccattttactttttgtcccgtagtagacgtaataatatcattcgtttttttaagctgctgattgatttgactagccgataaagtggccatatcaggatgagaataagagtggtttcctacttcatgccctgcgtctacaatcatttttgccatatctggattatttttaacccattttccttctaaaaaaaaggttgctttagcatggtgctttttaagcacttctaacattttaggcaaatactcgttcccccatgctacgttcactgtaaacgataccataggcttttcatcgtgtccacggtagataggttcctgtggtaaatccttcaagtgaacctttggtctaacctgtttgtacactagttttttttcatcaaatttacccgcaggtttcatatttttataagaagcagcaagatcaacttttatgccgttatagccaggaacccgtttccaaacgggatcgattcgtgcattcgctgccggcttttcataatcttttgctttttcttcaatcttttgatataacgcatcatgctgagctgatacaagttgtacatcggatttaagtgcttctatatatgcttcagcaaaaggattataaatagatttatatgtaattgccagtaaaaatagaaatgctgtaaattgcacaatggttctcttcacttatccttccccctttaccatttaaaatatgtataaagaggacaaggtagaacaaacatctacaaacgataaaatcgccctacacatggattttcttcatgtatggacgatttcacaatatctatatagtagtaaaagaagattattttgtttcttttgctttttcttctttttctttttgttcttttaaaattgctttacgagataagttaacgcggccttgtttatcaatttccataaccttaactagaatctcgtcgccaattgatacaacgtcttccacttttccaatacgctcttctgcaagctctgaaatgtgaacaagcccatcttttccgctgaagatttctacgaatgcaccgaatttttcaattcgttttacttttcctaagtacatttggccgacttcaacttcgcgtacaagatcttcaataattttcttcgctttttcattcattggctgatcaatagaagaaatgaagattgtaccatcttgttcgatatcaattttaacgcctgtttcttcgatgattttattgatttgcttaccgcttggtccaataacatcacgaattttatcagggttaatagccatggtaaggatcttaggcgcatattgagaaagctcttgacgaggcgtagcaatcgttgacatcatatgatttaagatctgcatacggcccttttttgcttgttgaagggcttcgtctaaaatttcacgagataacccgtcaattttaatatccatttgaagcgcagttacgccattttccgtacctgctactttaaagtccatatctcctagatgatcttccattccttgaatgtccgttagaatcgagtagtgttcacctgatttgatcagacccatggcaatccctgctacaggtgctttaattggaaccccagcatccatcattgcaagcgtacttgcacaaatactcgcttgtgaagtagaaccgtttgactctaatacttcagatacaagacgaattgtataagggaaatctttttcatttggaataacaggctcaagtgcacgttcacctagcgcaccatgtccaatttcacgacgacccggtccgcgcattggtctagtttcaccaacactaaatgaagggaagttatagtgatgcatgaagcgtttagattcttctacacttaaaccatctaaaatttgcacatcgccaagtgcacctaatgtacagatgctaagcgcttgagtttgtccacgcgtaaataatccagatccgtgtgtacgaggaagcaagtttgtttcagaagaaagtggacgaatttcgtcaatactacggccatcaggacgcactttttcttctgtgatcaagcgacgcacttcacttttaacaagcttcgataaaatttcattcacttgatttagtacttcttcttctacatcttgctcttcaaattttgcagctactgcgcttttcacttctttaatcgcattttcgcgcgcatgcttttcttgaacttgaacggcacggttcatgtcaccttctgcaatttcgcgaacttgacgctcaaggtcagcatccacagtataaagcgcaacttctactttttctttgcctactgctgctacaatttcttcttggaacgcaattaattttttaatttgctcgtgtccaaacataattgcttccagcattacttcttccggtacttcatcagcgcctgcttcaaccatgttgatcgcatcttttgtaccagcaaccgtcagatgaatatcgcttttttcaagctcatctaccgttgggtttacaacaaattcattgtctacacggcctacgattacgcctgcaataggaccttcaaatggaatatcagatactgataatgctaatgaagaaccgaacattgccgcgatttctgaagaacagttttgatctacgctcattacaacgctgacaacttgaacttcgtttcggaaaccatctgcgaataaaggacgaatcggacggtcgattaaacggctagccaagattgctttttcacttggtctgccttcacgcttaatgaatccacctgggattttaccgactgcatataaacgctcttcatagtttactgttaacgggaagaaatctacatttttaggctcttttgaagccgttgctgtacttaatacaactgtgtctccatagcggattaatgctgcgccatttgcttgttttgccaactggccaacttcaacttctagctttcgtccagctagatctacggagaacactcgtttttcttgttccatatcgacgagtacccctctctacatataaaatatgtatgtaatcaaatgtgatagttttattataaacgaaatatccaaaaacaatagcttttttcacattatgtagcatctttaatgtttcttaaatgtacatactaaaaaagcgggaatgctcccgctttcttcttattatcgacgtaaaccaagtttgttgattaactcacgataacgagtaacgtctttgttacgtaggtagttaagtaagttacgacgtcgacctaccatttttaaaagaccacgacgtgaatggtgatcctttttatgagtacgtaagtgaccgtttagattgttaatttgctctgttaggacagcgatttgaacttctggagaaccagtgtcgttcgcatgagttttgtactcactaatgatttcatttttacgctcttgtgtgatagccatcctattcacctccttattattaaaccccagttaccgagcaaaacgttggtgaatcgtaatgccaagcaatggttgttttacatacaagtgttatgttactacttattagaacaaaaagcaagtcgtagcaactatttatatatttttttttatttcttatgcttttgaattccttcaaaataagcaagggcttcttccttgtcctttgagatctgaccgacaagctcttcgatgccgctgaactttttttctgaacgaatcattcggtgccatttcactgttacgtgctgatcgtagatttgctcgtcaaatgataataagtggacttcgattgttggcttttctaaattatcgtgaaaagtcggcttatagcccacgttgcatactcctgcataccacttgccatggagctgaagctcaacagcgtacacgccgatgcgcggaagtaaatactcatcgtctaaagcgatgttagcagtcggaaaacctatttgcctgcctcgcttttctccatgagtcactgtacctgacacttcataatagcgcccaagcagctcttttactcgatgcatgtctccatttgctaaattttcgcgaacgagcgttgaactaattttttcttccccatttgttaacttatcaattgttgtttgagtgaattttgatcgagaatgaaatggtagtatttccattgttcctttacctaactttccatacgtatagtcaaatccagctaccacatgctgcacattcaggccaataatatactgatcaacaaactcttgaggcaatagtgctgcaaactgtttatcaaaatgaacgatatataaaaagtcaattcccatttcctcaatgagtttctttttttcttgaagtggtgtgatcatatcaatgtgctgcacgttgcgcccaagcaccacagaagggtgaggagtaaacgtcatcacagcactagctatgcctttttcatcggctaactgttttgctgaatttatcacttgctgatgccctaaatgcacaccatcaaaataaccaagtgctaacactgattgttgaacagcttctcgttgaaagtggtgtggatgtcgaatttcaatcgtttccaaaacacagttcaccttttccctaaccggtctagtcgattgccaacactttaaccggcttcattaaatgttttttcgttgggtgctgagcataaattgctaagcacttgcctgcagaatttatcattaaaaagaatggttccttttttaactcttcatcttctgtgcacggcaataccgcgccatttttcactttctctgctaatgtatcactaatttgaagtttcggcaaatgattaagagcttcttcgatcgaatgcagtttctcattgatcgtttcttcttctaccgcccgttcaatatcttcaaatgtcacacaatcttccagtgaaaactgccctgaacccgttcgctgcaaataagacatatgagacggatagccaagtgcttctccaatcatcacagcaagcgttcgcacatatgtacctttgctgcacgttacgcggaatttgaaggaaatttgttctccctcaaatgcagcgcgatcgtctagcagttcaaagttatagatatgaatggttctaacagggcgctctacttcgattccttgccttgcatattcatatagctttttacctttgacttttaccgcggagtacattggaggcacttgctgaagttctcctgtcatcgaagacagcacttcttcgatttgagcacgtgaaaaagaatccactactttcttttcttctacaacctctccggaagaatcttctgttgttgtagaaaatccgagtgtaacttctccttcataggttttagtagctcctgttagatactctacaattttggtagctctaccgatacaaataggcaatacccctgtaacgtctgggtctaatgtgcctgtatgccctacttttttagtgcgaagcagctttcggactttaaacacacagtcgtgcgaagtcaggccagctggtttatgtaaaattaaaacaccgtccactcattcttcatctccttttcatttaaaaaagggtgtctcagaagcaaaaaccacttttgagacacccttttttgtttctacattcactgatcttattcgttctcttgatggtcatcgctttcttttttaatttcatgaagcaatgattcaattcgattaccataatcaattgattcatcaaactcaaacgtaatttcaggtgttttacgtaagcgaatgcgctgaccgatttctgagcggataaatccttttgctttcgcaaggccttttaacgtattctcacgctgttcagcatctcctaaaacagagatatacactttcgcttgctgtaaatcgcctgatacttgaacatctgttacagtcacaaaaccgatgcgcggatccttgattttacgatttaaaatctcgcccatctcttttttcatttgttctccgactctagttgctcttatgttcatctgtgtcaccccttttataaccaatcaaaagttgtaatggtacgttcaatctctggaaaagaatcaatcaagcttagcgctttttgcagttcttgttccgttgtgacacggctagatgagactgcgacaatgctaatttttgttcgttgccacacatcttgaaaatcagtttctgaaactgatacgttaaaccgctgcttcaagcgcatcaagatgcgctgaagcacggcacgtttttctttaagagaagcagcattgtaaattaagcattcacactccactagtccaatcatttaggatcaatttgctccattacatatgcttcaataatatctccttctttaatatcattgaagtttttaattgtaataccacactcatatccttgagcgacttcttttgcatcgtctttaaagcgttttagcacatctacttcaccttcaaagataacaattccgtcacggattaaacgaattccactgttacgtgtaattttaccgtccgttacgtaacttcctgcgattgtaccaacttttgatactttgaatgtttgacgtacttccacttgaccgatgattttttcagcaaactcaggatcaagcattcctttcatcgcagattcaatttcttcaattactttataaataatgcggtgaagacgaatatctacgttttctacgtcagctgtacgttttgctccagcatccggacgcacgttaaagccgataacgattgcgttagaagcagttgcaagaatgatatcagattctgtaatcgcacctacacccgtatggataatacgaacatttacaccctctacatcaatcttttgaagagcagcagccaatgcttctacagaaccttgtacgtctgcttttacgataaggtttaagtctttcatttcaccttgtttaattttttcaaataaatcatctaagcttacgcgagatttttcaccgcgctgttgttcaagctgcttttgagcacgagcttctccgatttgacgagctgttttctcatcttcaaacactaagaaacgatctccagctaacggaacttcgtttaagccagtaatctcaaccggagtagatggtcctacttccttcacacggcggccaatatcatttaccattgcgcgaacgcggccaaacgtatttccgactacgattggatcacctacgcgtagtgtaccagtttgaacaagaagcgttgctacagacccacggcctttatctagctgtgcttctacaactgtacctgctgcacgacggttaggatttgcttttaactcttctacttcacttacaagtaaaatcatttcaagcaattgatcgatcccttcacctgaaatggctgaaagcttacagaagattgtttctccgccccactcttcagctacaaggccgtgctccattagttcttgcatcacgcgatctggatttgctgcttctttatccattttgttaaccgcaacaataattggcacttctgccgcttttgcatggttaatcgcttcaattgtttgaggcattacaccatcgtctgctgcaacaacaaggattgtaatatccgttacttgcgcaccgcgagcacgcatcgttgtaaatgcagcatgccctggtgtatcaaggaatgtaattttcttttcatcaaccacaacttgataagcaccgatatgctgcgtgataccgcctgcttctgcagccgttacttttgtgttacggatagagtcaagaagcgtcgttttaccgtggtcaacgtgacccatgattgtaacaactggaggacgcacttgaagatctttttcgtcatcaatgatttctaatgattcaaaagcagtgtcatctactactacttcttcttcaacttctacaccgtattctccggcaattagttcgatagaatctttatctaactcttggttaattgttgccattacaccaagcataaataattttttaataatttcagaaggctctttgcctaattcttttgctaactcagaaaccgttaagcttccgacaaacgttactttttccggtaactcttttgcagctgctggagctggtctaccttttggtgcctgtgacttttgtgcctgtggctttttgttacctttattgtttcctttgttagctgttgattttgtatttttattcaatactttcacccccataaaattaaccgagcatcgttgctagctttttagcaaatccctcgtccataacggctaccacaactcgagcatctttaccaatcgcttgacctagcgtgtagcgatcgggaacgattttaaccgaaacgttatagtaagaacatttatccgttacttttttctttgtgttttcagacgcatcgcttgctaaaagtactaactttgctttttgtttccgaacttctctaaccacaagttcttctccagaaatcaatttgcgtgcacggtttgcaagccctaaaaaggagatccattgttcattcattagcgtgactgtttctccttttctacaagcgctagcaactcttcataaaccgcttcatctattgacgcgcctaaatgtgtcgaaagcacatttttcttttttgccaataaaattgcttctttatccttgcttacataagctccgcgcccggactttttacccgttacatcaactgaaacgtcgccttcttttgagcgcacaacgcgtactagctcttttttaggcttcatttctccagtggccacacattttcgcatcgggacttttttacgattgttcaccttggctcacctcttattccatatcttcatctgaatcaaatgcatgttgacttactagcatatcatcgctgttttttacaaccataccttcttgttcagcttctgattgacttttaatatcaattttccagcctgtcagcttagcagctagacgtgcattttgtccacgtttaccaattgcaagtgacagctgatagtcaggaacgataacagttgttgctttttcattttcatctacaatcacatctactaccttagatggacttaaagcgttggcaacaaattcaactggatcatttgaccagcgaacaatgtcaattttttcaccttttagttcatttacaacagcctgtacgcgctgaccttttggcccaacacaagaaccgaccggatctacttcagcatactcagaatgaacagagatttttgaacggtctccagcttcgcgagctactgattttaattcaactgtaccgtcatagatttccggtacttctttttcaaaaagacgttttaaaagacctgggtgcgtacgtgaaacatagatttgcgggccttttgttgttttttctactttcgtaatatacactttaatacgatcatgaggtttatactgctcatttggcatttgctcgctttgaggaagcaatgcttcaattttgccaaggctcacatagatgaagcgagaatcttgacgctgaacaatacctgtcataatatcttcttcgcgatcgctgaactctgaatagataacgcctcgttccgcctcacgaacacgctgtgtaacaacttgttttgctgtttgagccgcgatgcgtccaaagtcttttggcgttacttcgatttcaaccacatcgtctagttggaagttagggttgattgtttgtgcttcttcaaccgaaatttccaggcgtggatcatatacttcatcaaccacatctttgcgagcaaacacgcgcattgaacctctttctaaatttaaatcaacgcgtacgttttgcgcttggttaaagttgcgtttgtaagcagaaattagcgctgcttcaattgcttcaataattacatctttgctaatgcctttctctttttcaagaatgactaaggcatcaaataactcactgctcatcgttggataatccccctttaatattggcccctacacattaaaatacaatcgctaatcgagcaaaagcgactttgtcatatggtaaaaccaccgtttttgtgcgtgttttgatacgaatagataatgtgacagtttctccgtcaaatgattgtaattcgccttcaaattcttttgcaccttcaattggttcatatgtttttatgtatacatgcttaccaattgcacgttcaaaatctttatctttttttaatgggcgttccgcaccaggcgatgatacttctaaaaaatagttatgagggattggatctactgcatccattttctcactcaatttttcacttactgctccgcagtcttcgatatccacgccggtatcagaatcgataaacacacgtaaaaaccaatcttttccttcttttacgtattcaatttcaacaagctctaaattcatttcctctaagataggggaaaccatttcttccactgtttgttttacatttttactcattctaatcctcccttcgagacattgcatggtatgtttaggttacgcgttttttatgtctcttatatcaaaaaagagtggtttatttgctatttttattttgcactctataagaggtctaacctactagagtggaaatgttgtcatttgtgttgcaggattttaaacgtcacataataaatcaatcatggtgattgaaaatctacagaaaaaacgaatcatgctagaagccgattcgttctccatactacttactatgtcagtaagttcatatcaataagaaagagcgggtttccccactctttctcgtccgtatccttagcatttccacaattactatatcataaccgcttattttatgcaaatgttagaaaagagaaagctggttctgatcaggtaatgattcaaggcatccatggttgtctagatactctaaaatcgtcttcgatactttgcctcgctgctgcaagtcttctttcgataaaaactctcccgtttcacgagcttttacaatgttcagcgctgcatttgtgccaagaccgggaatggcattaaacggtggaactaaagacgtgccgtcaattaaaaattcgtctgcgctagattcatataaatctacttttttaaatgaatagcctcgttcgcacatttctaaagaaagctcaagcaccgttaataagtttttctctttaggagatgcatctaaacctttggcattgatttcttccatcttcgctcgaatggcagttgaccctttgatcatcgtatcaatatcaaagtcatctgcacgaaccgtaaagtatgctgcgtaataaagaagcgcgtggtgcactttgaaataagcaatacgcacggccatcaatacataagcagccgcatgggctttagggaacatatacttaatctttttacaagaatcaatataccagtccggaacaccatttttgatcatttcctcttcaaattcaggtgttagccctttccctttacgtacagactccataattttaaaggcaagtgaaggttcaagaccttgataaatcagataaaccatgatgtcatcacgacagccgattacttcacttaagttgcaaatatcattgcgaattagctcctgtgcattaccaagccatacgtccgtcccgtgcgacagtcccgagatttgaacaagctctgaaaacgtcgttggcttcgtatcttctaacatttgacgcacaaagcgcgttccaaattcaggtatgccaagcgttcctgttttacacataatttgctcttctgttacgccaagtgattccgttccactaaaaattttcatcacttcaggatcatccgtcggaatcgtttttggatcaattccacttaaatcttgaagcatgcgaatcacggtcggatcatcgtgtccgagtatatcaagttttaataaattatcatgaatcgaatggaagtcaaaatgagttgttctccactcggaattacggtcatcagctggaaactggatcggtgaaaaatcgaagatatccatatagtccggcacaacgataatcccccctggatgctgacccgttgtacgttttacgcccgtacatcctgctactaaacgatccacttctgcgtttcgtaaatgtaaatcacggtcaccggcatagccttttacatagccataagctgttttttcggctactgtaccgattgttcccgcgcgatatacattatcttctccaaacagtacttttgtatagttgtgagctcgcggctgatactctccggagaagttcaaatcgatatcgggaactttgtctcctttgaatcctaagaacgtttcaaacggaatatcgtgtccatctttaataaatggtacgccacaatcgtcgcagcttttgtccggcaagtcgaatccggaaccaacggaaccgtcattaaaaaactcggatttcttacattttggacaaacataatgcggcggcagtggatttacttctgtaatttccgtcatcgtcgcaacgaatgaagaccctacggaaccacgtgaaccaactaagtaaccatcattcaacgattttttaacgagtttatgcgagatcaagtaaataacggcaaacccgtggccgataatacttttcaactctttctctagacgggcttctactacttcaggcagctcttcaccgtagatgctgcgtgccatcgcatagctcatttcacgcatttcttcgtctgcaccttcaatttttggcgtatataaatcatctttaattggtttaatatcgtcaatcatatccgctattttttgcgtattatgaacaacaatttctttcgctttgttcccgtctaaaaatgaaaaacaattcagcatctcatccgttgatctaaaatgaacatccggcagctgatgacggtttaacgggttagccccgccttgtgaaccaattaaaatttttcggtaaattttgtcttccggattgagatagtgaacatttcctgttgctacaaccggctttccaagcttttcaccaagcttcacaatattgctgataatatcttttaaggctttctcatcccgcactaaatccagttcaattaagtgcttgtagttgtcagggggctgcacttcgatgtaatcataaaattcagctgctccttctacttcatcaattcctttttgcatcatgccttcgaatacttcgcctcggtcacatgcggttccaatcaagatgccttctcgatatttatcgagctgagatcttggaattcgcggaactcgataaaagtaatttaaatgagaaatcgaaacgagtttaaatagattttttaaacctacgtcgttttgtgctaaaagcgtggcatgataaggacgggcccgctgatatgcattcccttctcccatataatcatttaagcgatcgtgcatcgtaatttcgcgttcaaatgcatctttcagcattttatttaacaaatagccagttgtttccgcatcgtaaatcgcgcggtgatgctgcacaagttcaatatcaaactttttagcaagagtatttaaacgatggtttttcatatgcggatacaaaaatcttccgagttcaagcgtatcaataacgccgttagctgctttttctaatccgattttttgcagtcccatatttaaaaatcccatatcaaagcttgcattatgagcgactaaaatactgtcgcccatccactcgtgaaaatcccgaagtacttctgagatttcaggcgcattttggaccatatcatctgtaatacccgtcagctcaattgttgttgcagacagaggatgatgaggatttgcaaatcgttcaaatcgatcgatgatttcgccttctttcatcttcacggcagcaagttcaataatggtatcgtatacggctgacaaaccggttgtttcgacgtcaaatacgacgtaagttgcttctgtcaaatccacatgctgcggattataggcaatcggcacgccgtcgtctactaaattgacttccactccgtacagtattttaatgccgttctttttcccggctccatacgcttcaggaaacgactgtgcaaccgcgtgatcagttatcgctacagccggatgtccccattttttggcttgtccgactaaagctccaacagatgaaacggcatccatttgactcattggcgtatgcaagtgaagttccacacgcttttcatcttcaggcgctgtatcctgtctagcgggaccggtaatctcgttaacatcatttccaatcataactagatcacgaacaaatgtatcgttttgtacacttccgcgaaccttcacccacattccttttttaatcgcttgaagtaaaggaatatcttctttatcacgcgaaaacattttaaccataatagagtttgtataatctgtcactttaaaaataagaagcgtacgtccgcttcgtaattctctcgtttctgcatcaaatacgtagccttcaacggcaattcgcttttcttcatccacaatggaatccaggcgaaccgtctcgtctttaatcgtatatccaattgtaagcggaccttttggtaggtctggtccatcacttttttcattttctttattttgcatttctgtgatggcttgtaatactttttctgtatcttcttgttttcgttgctctacaaactgctgaaatgcttcttctgaatgtacaacttccgtcattagctgaaggttcggaaacccataggacgcatactgatcagcaattaactgactatactttttacgtaaagccgttccttctgcatcatgtcgtgcgttcacaatcaatttggcaccgttcaatctcggcatttgatcttgtaaaagcgactgtaaaaggggagatatgccctgcatttctccaatacaatgcttccaatatgactgtacatgctcttccgtacattctttattaacggtttgaatagaaaaagaaacactcgcaatatgagaaaaagctgaagaaatgcgagcatggaataactcataaatctcaaaaggtaataacccttctaaagaaaaatggaaatgccattttttttgttctttctgaatgacgagcttttcaatcgctgcgttttcaaagtaaggaacaatttgatcactcgtcagctctaactgctgcagcagcaacttaaaacgctctttttttcctagcgtttgtgcttccaagttttctgcctccttttataaatgagtgcaatctattttaacataaatgacttctattctgtcatatgttctgtttataaacataaaaacagcagggatacaaatccccgctgcttcattacttcgctagcagttctttcactgttgaaacaagattgtcaactgacacttctaatgactccccagttttgcgtacttttacttctacaattccttcagatgcacgtttaccaactgttactcgaacaggaagaccaattagatctgaatctgcaaattttactcctgcacgctcttggcggtcgtctaacagcacttcaaagcgattatctaataactcattatataatttctcacctagttcacgctgttcatcatttttcacgttaactggaataacgtgcacttgataaggcgtaacagcttctggccatagaagaccgttttcatcattaaattgttctgcaatcgcagctactgtacgagaaacaccgataccatagcagcccataatcattggctggctgcgtccgttctcatctagatacgttgctcccatcgcttcactgtagcgcgttcctagcttaaagacgtgtccgacttcaatacctttagcaaacttaataacgccttgtccatccggtgactgatccccttcttggatgaagcggaaatcttcgtaagttgcattaaagttacgctcattcacatttgtgtagtgataaccttcttcatttgctccgcatacaccgttagcaattgcttttaccgcatgatcagctaccacttctactgaatcacttactccaatcggtcctactgaaccaactgcgcattttaatacttcttttgtttcttctggagttgccagttcaacaacggaagcttcaaaatagtttttcactttaatatcgtttacttcgtgatccccgcgaacaagtacaagcacaaaacgatcatctactttaaataaaagggacttgatacaagaagtcgcttcaacatttaagaaagcagctacgtcttcaatgctatgctgatttggtgtttccacttttgttaattctttttcagcttcacctgattttccatacgtatttacaaccggtgccatttcaacatttgctgcataagaagatgtatctgaataagcgattgtatcttccccgatttcagaaagaaccataaattcatgcgtatcttttccgcccattgcacctgaatcagcgataacagcacggaaatttaatccgcagcgctcaaagatgcggctgtaggcagcaaacattttatcatatacttcatctaaactttcttgagaagcatgaaacgaatatgcatctttcataataaattcacgaccgcgtaataagccaaagcgtggacgtttttcatcgcggaacttcgtttgaatttgatataaatttagcggtaaacgtttgtatgacttcacttcgtcacgaagcaagcttgtgataacttcttcgtgtgttgctcccaaagcaaattcacggccgtgacgatctttcatacgcattaactcaggtccgtatgaataccagcggccagactcttgccacaattcagcttgttgtaaagcaggcattaataattcgacagaacctgcacggtccatctcttcacgaacaatttgttcaactttttgcaatacgcgcttaccaagcggtaaaaagctgtacacgccgcttgcattttggcgcatataacctgcgcgcaatagaagctgatggctttttatatccgcatcagctggcacttctcttaatgtaggaatcaatgtagaactttgtctcataacctcgcacctctttgcttacttctctatcttatttttttaaggcggaccatgccgcaattttcatataatcagcgagggaatatccctcgctgagcgtatgtcttataaaaagaacttttgaatatcgttccacgttacaacgagcatcagcagcattaataaagcaaaaccgataaaatgaacaacgccttctttttgacgatcaattggcttaccgcgaattccttctacagcgaagaacaacagtcgtcctccatctaaagcaggaagtggaagcaaattgacaatccctaagttaatacttaaaacggctgcccatttcattagataataaatgcctgactgtgctacttgatcggttgctgcgtaaatacctacaggaccagaaagcatatccagtttgaactgtcctgtcacaagcttccctagacccgttaagatttctttcatccacgtatatgtctcagtagctccgtgcgtgatcgaaccaatgaatgacttttcaaccggtgcatatacgccaattaatccaattgtctgttccccaactttgcgactttcaggtgtaatcggaatatctagcgttttgccgccgcgctgaaccgtgaatgtaatttgctgttcaggatgtttttgaattacttttacgacatcatcccacgttgaaacactttgtccatcaattgcttgaactttatctccttgtttgagtcccgcatcaacggctactccatctgatgttaatttgcccatcacgggtttgtcaacaacatatccttgagaaatcccaagaacgataaaaataacaaaggctaatataaagttcattagcggaccagcgaaaatggctagcgcacgctgaccaagagttttagaagcaaactgacggctgtaaggtgcaatttgaatttcttctccgtccataacgaagtaagattcttctgctacctcgaatttttgcagacgttcatcttcaccttcttcataacctgaaataaatagattatgctctaagtctgcttgctctacctcaataacttttgcatttggatgctgttccttgttattaataatgactttatttactttgccttccttatcaaacatgaggcccaccatttgaccaggctttacttcgatcatttctgggtcttctccagccattcgaacaaatccacctagaggcagcaagcgaatggtataaactgtttcatctcgtttaaacgaaaagattttgggaccaaacccaatggcaaactcacgacataagatgcctgcacgctttgcaaaaactaaatgaccaagctcatgaaagaatacaagagctccaaaaatgacgacaaacgcaatgactgtgttcaatgggtattacccccttcatgtaatagagtcaaatctccaccccccagaaataagtgagtggcttctctcgcacgcacattatcgagagatggcggatctaacaaactctcttgcttctaaatctacttctttaatagtagataaacaaggtttctgtattacagtatgttcattcattgctttttcaatcacatcttcaatttgtaaaaatgtaatgtgaccatctaaaaaggcttgaacagcttcttcattagctgcgtttaaaacagtcggaagtgttccacccgctttgccagcctcaaatgcaaaagctaaacagcgaaaacgctcttcatccattttatcgaagtgaagctgaccaatatccgccaaacttaaacgcttggtgttaggcaaagacatgcgttttggatacgttaacgcgtattgaattggcacgcgcatatcaggcgttccaagctgagcaataacgcttgtatccgaatactctaccatagaatgaatgatgctttccttatgtaacaatacatcaattttctcatagggaagatcaaaaagccaatgtgcttcaatcacttctaaccccttattcatcatcgttgccgaatcaattgtaattttagctcccatcgaccagtttggatgatttaatgcatcttcaaccgttactccctgtagttctgctctcgttttatctcgaaagcttcctccagaagccgttaaaattaaacggtctattgctttttgatcttgcccttgcaaactttgaaaaatagctgagtgctcactgtctaccggtaaaatatcagcgccatattccttggctgcttccatgacaaggtgaccagcggtaacaagtgtctccttatttgcaatagcaatcgtttttctcattttgattgcttctagcgtaggagtcaaccctacacttccaagaacagcatttactaaaacttctgtggatggatgagtcgccacttccacaagcccttcttctccataaacaaatcgaatagaagggaattctgcttgcagtgacagacaatcttctttcttcatcacagaaacaagggctggcttacactgctgaataatctttcttgcttcattaatatttcgacctacagagattgctgagagctcaaaatgctccggatgcgctcgaacaatatcaacggtttgagtaccgattgaacctgtagctcctaacaaggaaattttcttcaagtatattcactcctattaaaacaaagacatcttttttatagagataataaaaaagctaaaattggcatgatgaacattaaactgtcaaaacggtctaaaatcccaccatgacctggtaaaatctttcctgaatcttttacgccatagtgacgtttgaacgctgattgtacaagatcacccatctgtccaaataacgatacgataataccaattacaagtagttcgatcatagtttgatcaatatttgctaacagcttaaatacaatggctactataatagcgcatacgatgccaccgacaaaaccttcaattgttttattgggactgatttccggccatagctttcgttttcccattgctcgtccaataaaataagctccagaatccgtcgcccaaataataagaaaagcaaagaacaaataagctaagccgaactcttgacgaacctcgataaaataatgaaagccaaagccaacatatactgtcgttaataaaataaacccaacgtcatcgaaggtaaatttatttttaactacaaccgtgtacattaataaaagaaggacagcagcaagcgctacttctatcttatgttcacttaagaattgaaatgcaacatctcttccatttggtagtaaaaacacccaggttagcaataaactaatgatacttggaaaagacattgctttcaaatgtttcatttttaaaagctcaattacaccaactgttccgattacatacatgataagggtaaaaggtaaccctccaattaaaacaatcggcacaaataccgcaagtgctacaatcgcggtgataatgcgctgtttcatcttgttttccacaccttcttatacaccaccaaagcggcgaccgcgcttttgaaacgcctcgactgcttcgattaaatgattttctttaaaatctggccataatacttctgtaaaccaaaactctgtgtaagctagctgccaaagcataaaattacttaagcgaagctcaccgcttgtacgaataagcaaatccggatctggaaggcttttgctcattaaataggaagaaaataaattttctgaaatagaagaggaagctacttttccctgttctacatcttctaccaatgactgaatagcgcccatgatttcgtgacggctaccgtaattgagcgcgaagtttaaaatcagccctgtgttatgctttgttttttcaattgcattatccacggctcgaatcgtatgggcagggagctcacttttatcccccataatacgaacttgcacatttttttcaattagctcaggcagaaaggttgttaaaaattcctctggcagtttcattaaaaactcgacttcaattttggggcgcttccaattttcagtggaaaatgcatataaagttaatactttaacacctaattcattggccgatctggtcacatgacgtactaccttcattccttcatgatggcccatcatgcgaggaagagctcgtttttgcgcccaacgaccgttcccatccataataattgcaatatgttcaggaacagggtgctgtttcacttgatcttttcgttctgacaaagacagtgtatttaaatcttgacttttcttccatgcttgaaattttcttaacatgcaaaggtcccccgttgtacgctctcacataaacgtgtggcttatgtgagttttttcttactacacattattaacaaaaaaaccccctgtaaacaatagagggtcttttacaatatattttaccttgaaatgacttaaactgccataatttcttcttctttatctttcgccactttatccacttttacaatatgatcatctgttagcttttgaatgtcatcactgtagccgcgtaaatcgtcttcagtaatttcaccttttttctctaactttttgaaatcatcgtttgcatcacggcgtacgttacgaaccgcaacttttgcttcttcagcatattttttcaccattttcactaactcacgacgacgctcttccgttaaagcaggaatcgataaacggataatagttccatcgcttgtaggtgttaaccctaagtcagattttaaaatagctttttcaacctcaccaatttgtgatttgtcataaggctgaataacaagcatacgagcttcaggcacgcttacttgcgccaattggttaattggtgttggtgcaccgtagtattctaccgttacgcggtcaagaagtgacgcgcttgcacgtccagcacgaattgatgctagttcgcggctaaatgattgaattgctttttccattctttcttttgcgttttgcaacacttgttttggcatgtttatttcccctttacaattgttccaatgttttcgcctgtaacggcacgtttaatattgccttcttccgtaattgaaaaaacaattagcggaatatcattgtccatacataatgaagaagctgtagaatccatcacagctagtccatcttttaaaacatcaatatacgttaatgtttcgtattttacagcatcaggtacaagcttaggatccgcattataaacgccatctacgttgtttttagccattaagatcacgtcagcttcaatttcagctgcacgcaaagctgctgttgtatctgtagagaaataagggtttcctgtacccgcggcgaagataacaacgcgttttttctcgagatgacgaacagcttttcttctaatataaggctctgctacttgtctcatctcgatagaagtctgaactcgtgtttgcacaccaatgttctctaagctatcttgaagagccaaagagttcattactgttgctagcattcccatataatcagcagcggcacgatccatacccatttcactgccaattttaccacgccaaatgtttccaccaccaacgactacagcaatttccacacctaattcataaacggcttttacttgttcagcaacagatttgatgatggatgggttaataccaaaaccctcttcaccagctaatgcttctccacttaactttaatacgatacgattatattttgcttgactcatgcttacctccatcgttaacggtgagatctcttttgtaaaaaagggaacacacagtgttccctatacggtcaaacccttactttttaacttggttcattacttcttcagcgaagttgtcttgacgtttctcaataccttctcctacttcaaaacgaacgaagctttcaacagtagcgcctttgctctcaacgaactgacgtactttttgatcaggatttttaacaaatgtttgatctagtaagcaaatatcttcgaaaaatttgccaaggcgaccttcaaccatttttgcaacgattttttctggtttgccttcgtttaatgcttgttgagttaatacttcgcgctcacgctcagtttcttcagcagaaacttggtcacgagagatgtatttagggttgattgcagcaatgtgcatagcaacgtcttttgcaacagcttcttcagttgtaccagataatactgttaacacaccgatacgtccgccagcatgtagataagcaccgaatgcatcagcatcagtttttgttgctacagcaaaacgacgtagagataatttttctccgattgtagcgattgcagagttgatgtgttcttcaacagttgcaccgttttccattttttgagtagcagcttcagcagcgtcagctggtttgttagctaagatgtgagcagctaattcttttgttaatttttggaaaccttcgtttttcgcaacgaaatcagtttcagagttaacttctaagataacagcttcgttaccttgagtttcgatgtaagttagaccttcagcagcaatacggtctgattttttagcagcttttgcaatacctttttcacgtaagaaatcgattgcttgctccatatcaccgttagtttcagttaacgcttttttacaatccatcataccagcgccagttttttcacgtaattcttttaccatttgagcagtaattgccataatgtgtagcctccttgtttgggtatgtaattaatgtatataaatgggttaaatcttttcaaaaaaaggtgataaaaggctattccctcttatcacctttcacggaattaagcagtagttgtttcagtttcaactgctgtttcttcaccttgtttagcttctagaatagcatcagcaactttagaagttaaaagtttaacagcacgaattgcatcatcgtttgcagggattacataatcaatttcgtctggatcacagttagtgtctacgataccaacgattggaatgtgtaattttttagcttccgctactgcaatacgctctttacgagggtcaatgatgaataatgcatctggaagttgtttcatatctttaatgccgcctaagaatttttcaagacgctctaactcttttttaagttgaactacttctttcttaggtagtacttcgaaagtaccgtcttcttgcattttttcgatatcttttaaacgtttgatacgtttttggatagttgagaagttagttaatgtaccacctaaccaacgttggttaacaaagtacataccagcgcgagctgcttcttctttaacagaatcttgagcttgttttttcgtacctacgaataaaacagtaccgccgtctgcagctaattctttaacgaatttgtacgcttcttctactttcttaactgttttttgaagatcgataatgtagatgccgttacgctcagtgaagatgtatttcttcatctttgggttccaacggcgagtttggtgaccgaaatgtacaccagcttctagtaattgtttcattgaaattactgacatgtgtttttcctcctaatggttttaagtctcctccgctcatttcatcttcagccgaaactacaaaaagtagcaccatcaaccgaatcaacaagcgtgtgtaataacaccaaaaacaaatatagcacactcctttttcacaagcaagcgtttcattaagtttattgatgaaatttcaataataattcaatttcagttttccctctgtgtaaatgttttgcaatttcttcaattgttaaaccttttctctttaaataaacagaaaattcttttatctcttcacctgacaaatcttgaatttggtctgtagttaattcatcaaaaggtgtgcatatatgcttctgattttcttctatagaaagaagttcatgcagcgactgggacggctcactttttagatccaccctttgaacaggcacgtcttcttcatctaccaaaggtgattttacgctacttttttccacttccgaagaaagcgaagtcgaacgctctcgaagctgccttaaaaactgttcgttttgttcttgaaattcagcgagatatgaacccatcgcagcttccattttatttatattttgctggtgcaagcgttcaatccttttcactttggtcacttgcatatataaaagaataatgcaaaacagtgatagaccatgaattaaaaaactaactgtgagtaaaaaccccatccttttacctctttgctaaattattttacttaaactcgtacgcattttaaacagcgctttcgaatgaatttgagaaatacgtgaagtagatagccctaacagctgtgcgatttctgtaaaagtcaactcttctttatagaataatgaaacaacgagctgctctttttcatttagctgctcgataacttcagcaagctcttgatatcgttcgtcgttaattagctcctcttcaggagagagcgttttttcatctttaatcgtatatttttgttctccatcttcatactctttcggctgttcttccattgacaacacgttagctaaaaagccttcattcatcgtatgaacgacatctgcttctgtcatgcctacttcttttgcaacctcacttggtgcaactctgcgcaagtatctttgttcaagtgcttctgttgcttgctcaatccttttcgtcttttcccttgcgcttcttgataaccagtcttctttacgaagcccgtctattatcgcccctcgaattcgaaaagacgcatatgtatcaaactttaagtctctaccgtaatcaaacttttccaaagcatcgtaaagaccgattaaccctaaactacgaagctcttctttatgaatatttttcggcagccccacgctaatccgctgaacgtgatagttaacgagcggcatatactttttaacaagcatgtttcccgcatgtgagtctctcgtctctctccattcctgccaaattttatgttcttcaacttcttgtatacttttcaagggtctttcaactcctttttatagcgctattaaacgatcagagcgcgctttatatcgtttttatcccttcgttaatcgtacgaacctttaaaatagccgtttgaggatcaaattcaattgtgcgtccgttgtgtcctcctgtagcttttgctgcaatttctacactgtttctatgcagctctctctctactgcttgaacatttcgaaggccaattcgcatgacatcatttcttggttcaaattgaaacatctgcgcgcctcctgctatttttgcttttaacaattttctatgtgcgccttgtttaatcaacatatttaccaaatcaaaaatggctgtatctgcatatttagctctattaaaaggacatttagctccgcttgaatccggaagcatcacatgagcgagcccagctactgagtgaacagagtcataaacgacaactcctacacatgatcctaatcccgctgttcgaagcactgcgggtgcatgtgtaacattcatctcggcaattcctaccttaatcacttgtttatcatctctcacgattcttcaactcctagaaccttcagcgtgatatccattattcgtttgactcactggaggtggtcttctaaagagagcactttaggtaaatttagaagaacaattaaacggctatctactttaacgactccgtttaagtattcaacagctgttccttcaactgtttcaggcactgaagcaatcgttttttcatcaatatccactacatcatttgccgcatcgacaatcaaacctgcttctacatcattaagacgaaccataataatacgtgtcagctcatggttaagctgttcttgcaagttaaaacgagtgcgcaaatcaataatcggtgtaataacaccgcgaaggttaataacaccttttacatattcttttactccaggaacgcgtgttatgtgctgaatcttttcaatcgactgcacttcttctactgagattccgtactcctcgtctcccaattgaaacacaataattttcatgcctttctccctttcttttcacagcatttgttatttaatcaaagcgttgcaatcaatgataagtgctacttgtccatcccctaaaatcgtggctcctgaaatagcaaacacacccggcagataatgacctaaagattttaaaacaatttcctgctgaccgataaaagaatcaacaattagcccagcggtcttttctccttttttcacgatgactactgaataatgatcatcttgtaccgagttaggcacagtgaatagttcttttaaatcaagaagaggaataatggctcctcgaaagtcaataaccttttgaccgtgtacatgcatgacctctttgggctgaacaatagctgtttcaataatcgaagaaagcggcaaggcatagcgctcttcactcatttgcacgagtaaagcagaaatgatagaaagagtgagcggcagttgaatagaaaaacgcgaaccgtatccttcgttagaatcgatcgttacagaaccccctagcgattcaatcgtgtttttcacgacatctaaacctactcctcgtccggaaacatctgaaatctgctcagccgtcgaaaagcccgaagcaaaaatgagctcgtacacttgtttatccgtcagcgtttcagctgttttcccatcaataattcctcgatccaacgctttttgcagtaccttttcacgattgatgcccgccccgtcatcttctaaatcaataaagacatgatttccgctatgataagctttaaggcgaatcgttcccttttcattctttccgttctctaagcgtgcttgaggcatttcaattccgtggtcaacggcatttcttaataagtgaacaagcggatctccaatttcatcaatgacggttcggtccagctctgtatcagctccgacaatttgaagttcaatttgtttccctaaatcttttgaaagctgtctcaccatacggggaaaacgattaaaaacggtttctacaggcaccatacgcatgtttaaaataattgtttgcaagtctcccgaaatacgagacatccgctctaccgtttcgtctaattcgctattattcaattcttttgatatttgttctaacctgcctctatcaataaccagttcttcaaacaaattcataagactgtccaaacggtcaatattaactcgaatcgtcttgttatttgagggctgtcttttctcttcaacaggcgatttggaaggttctgacatagtaacttcctgtatggctgttgctacttctgatgaaacaagcccctccatttctgtctccttttttacggggaccgcagcaattttcacactttctacctcagagacttccataatgctcgcctgcagcttttcttgtgattcgtttgttactagtaaaacgataaaagataattcaaatttttcctgttcgatatcttgaacagttggcgctgacttaatgacgtctcctgcttgctctaacacatcaaataccatataagcgcgtgcagcttttaataagcaggtgcgttcaagctgtacggttatttcaaacgcgttaaatccttggtctgctgtttggctgagcagcgtttgtactaattcatcgtactcaatggaagaagctgcatgctgtgctacaggttcctctgctacaatacgctgcagcttttgaacaagcaatttgacatcaagctgaccatcgccgccttcagaaatagattgaaccattatttctagcgcatcgactgattcaaacaaagcatcaagaacttccgtatgaacgtcgagttggtgatttcgaacagcatctaacacgttttccattttgtgagttaattgtgctaaatcatcaaatcccattgttgcagacataccttttaacgtatgagcagaccgaaaaatttcgtttacatagccaagatcatcggtatttttttcaaaacgcattagctggtcattaacgttttgaagatgttccctgctttcttcaataaacacttctagatattgattcatatccatcgtaactttccctcctatttctgtgcgtagcgagaaataaagcttccaacgtttcgcagcggttcaatataatcaacaagttttgtagaaacggctgatttgggcatcccataaatgacagccgtttcttccgattcagccaatataagcgcatctttatttttctttaaatcaataaccccttctgttccatcggcacccattcctgtcaacacaatagcaagtttttgataacctgaaattttactaatcgactgaaacaaacgatccactgaggggcgatgtccctttacagatgaagaagtatctaaacaaatgctgagctgtccttttttctctacaaccgtcatatgaaaacctccaggcgcaatataagcacatcctgagcgaacgatttcattgtcttttgcttcttttacttcaatatcagctagctgatttagtctaagcgctaatgattttgtgaaatttggaggcatatgctgcacaataaaaataggtgcgcttatgtcttttgaaacagttgataatacttcttgcagcgcacgcggtcctccagtagaagtgccaatacaaatcattttgttcactttcgtccccatcgggaggttatatacactgctgtttcgtacgtgctgatgactgcttgaagatatgttggctttactagcaagcaatagtttagagataagctcatctttcactttatgtaagtccagcgaaatagctcccgaaggtttagcaacaaaatcaactgcgccgtactgcatagcggtcagcgtattttcagcaccttctattgttgtactcgataacatgacaacaggaaggggcttcacacgcatgagctgttttaacatatctaagccattcattttgggcatttcaatatcaagtgtcacaatgtctggcgacagctcgagcgctttttttaacccttcttcaccgttacgtgcggtacccacaacgtgaaaacgactgtcacatgctaaaaaatcgccgattagctttcgcataaatgcagaatcatctacaataagcacctttatttcattcactctaatttcctacctttcaagaaaaaatcgtttgaggcgccgaataaacattccctcgtttttagccgttatcctattgtcttgaggaataagaatactcaccatttctattagtgatatactcgctttagatgctggattttgaagcaaaaaaggcatttggcgattgaccgctttctggacagcttgatcgtttggtacaatacctaatagagaaatagatatgttcaaaaactgctgaacagctcggctaaatcgttcatacgtctcatttccttctttgtcagaaagcgttttgttaataataagacgaaccggtgctgatacagaataggaagctgctagcttaatagcagcgtaggcatctgttatagatgtaggttctgatgttgtaaccacgatcatttcatctacagcttttaaaaacttaagtacactctctgacatgcccgctcccatatcaaaaatcatataatcatattgatttattaacgaattcaattcttgtattaaatgagcaagatctgatggagaccattcaaatacagaggaaattcctgttccaccagccacataagctaaattttgaggaccttttttaataatttgctggatggaaagctttttttctagcaaatcgaccatcgtatatgaagtagtttgcccaatcaaaatatcaatatttcccatccctatatccatatcaaaaagaagaactctttgcttttgcttcgttagcgcaagagataagtttaatgatagattcgactttccaactcctccttttccgcttaacacggctagtgttttacaattccttaaagagttttgatgcttctttaacactttttctcttaaaactgctgcttgatcattcatctttccaatctccaaatacatcgtcaataaactcttttattttaaatgccgaaacatcttctggtacatcctgcccgtttgttgtaaaagcaactcgctggccgtaatgatataacatatttaaaagcgagcctttacgggtggtttcatcttgcttcgtaaaaatcaagtgatcaacaggcagactagcaaaacgttcatatacagctttcatatctgatacttttgacgttagggctaaaacaagaaacgtttgcaaatcttcttgaaacgtaataattttctttaaatcatttacatattgctgttctaaaaagttccgacctgctgtgtcaataaaaatcacatcgtatgcttccgcttctagcaaagcttttttaaaatctgctccgttataacaaatcgttaaaggcgcattcaagatcgaagcgtacgtcttgagctgctcaatcgctgaaattctatacgtgtcagttgtaataaatgctattttttgattgtgttccaggacacattttgcggccaatttagcaagagttgttgttttaccgacacctgttggtcctactacacttacatattttttgaaaggaccgctccattcacttgctttaaactgattgccaaaccagctcttcgtccactccataagttgatttgagttagggcgatgtaagtagtagtactctagcataggagcctctatactttttaaaatagcttcgtctatttcttgcaaacgcaaataggcaaacacatcctccactgcttttggatatgaacctgaagaaacctttggcacttgattcatttgtgagacaagagtatttaactcactgagctgctgcttcataaaagattgattatcttccatactgggttctggcgacgatgaattcttctttacgctcagcttttctacggaatcgacagctgccaatacttctatttttgccttagtaaatagaccaagaaaccctcctgttcgaatttgttttgaatgtaaaataaccgcttcctcacctaaatctgaacgaatggctttcatagcttgcggcatggatgctactacgtatttttttactttcatcagatatccaccactccaacactttgaacttcaacatttgcttctagctcgttatatgataaaaccgccatatggggaaaataccgctcagtgatttgacgcacgtacatcctcaccgcaggagaacataacacaattggagactgttcttgaaaagaaagtgtttctgtttgcttggctatactttccaggatagcttgtgaaacgttagggtctagtgacaaataattcccatgctccgtttgttgaacagcttccgccatcattttttcaacttttcctgaaagggtaagaactcgaagcagaccttcttggaccgtatattgactggtaatttgtcttgcgagtccttgccggacatattcagttaacaaatcggtgtctgacgtcattttgccgtagtccgccagcacctcaaaaataatgggtaaatttcgaattgagacgctttcttttaaaagctttgccagtaccctttgaatgtctccaacagaaagcggattaggcgttacttcctcaattaaaataggatacgtttcttttgtgtgatcgattagttgctttgtctcctgccttccaatcagctcatgcgcatacgattttataacttctgttatgtgcgtagacacaaccgacggcgggtcaacaacggtatacccgaacatctcagcctgctccttcgcggactcactaatccattttgcaggcattttaaaagctggctctaacgtatcaattccttcaatcaaatcatcatccactcccggactgattgctaaatagtgatcgagcagcagctccccttttgccacttcattgccctttattttaagacagtattcattgggctgaagctgaatgttgtctctgatgcgaacaaccggaatgaccaatcctagctcaagtgccagctgtcgcctaatcatcacaattcgatcaagcagatcgcctccttgattcgtatcagcaagcggaattaatgcatacccaaattcaaattcaattggatcaacgcttaatagattgacaacactctccggacttttcatttcattgtcttcaagctcttcttcagtaggcgccatttcttcacgaaccgcctgatgcttagcccgagacaaataatagcctcccactcctaacaaaatagcaataggcattgtaataacatcattaattggcgtaattaaaccaagagccgcaatcgttcctccagtgacataaagcataacgggaaaagcaaacagctgctgtgtaatatcttcgctcaaattacctgttgaagcagctctagtgacgataatacctgtcgctgttgaaatcataagggctggaatttgactcactaacccatcgcctactgttaacaaagtaaaggtttgggatgcttcagtgatggacattcccatttgcagcatgccgataataatcccaaataagatattaatcagggtgatgacaatccctgcaatggcgtcacctttgacgaatttactggctccatccattgctccataaaaatctgcttcgcgctgaattttttcacggcggtcaattgcttgcttttctgaaatcatacctgcatttaaatctgcatcaatactcatttgtttacccggcatcgcatctaaggtaaagcgggcggctacttcagaaacacgctccgctccttttgtaataacgagaaactgaatgataattaaaataatgaagacaacaaagcccaccaaaggattgcctccaataacgaagtggccgaatgtttccaccactccgcctgcttctcctgttcctaagattgaacgtgttgtcgatacattcaaacctaatcgaaacagcgtaagaaccagcagcaaagacggaaataccgatagctctaaaggttctttcatattcatggaaacgagcagtacaagcagtgcaagagaaatgttaatcatgattaaaatacttaataaccatgaaggcaacggaataacaagcataacgataataagtacaacacctataacaactggcagttctcttgcagacattaatttttctctccttacaatagcgtaacgttacattttattttgaatgcggtatacgtaagctaatatttcagccaccgctttaaaaaattcttcgggtactgcatctcctactttagtttggtcaaaaagtgctcttgccagcgggcggttctctaccatgatgatttcatggcttttggcgattcctttaatcttttgagcaataaaatctacgccactggctacaacatagggagcatccattttttcttcatcatattttaaagcaatggcataatgagtggggtttgtaatgatgacatctgcttttggaacttcttgcatcatgcgagacattgccatttcccgctgcttttgctttatttttgatttgattagaggatcgccttcaatgtttttatgctcatctttgatatcttgctttgacattcgaatatttttctcgaaatcaaaattttggtaaaaataatcaagcagcgataaaaataaaagcataagcgaggctgcaagtcccatttgaaaaacaagcttagacagaacaaccagcgagtcccctatacttttttgagataaatttaatacatcttctatgtgaatccataagataaaaaacgtgacggctccgatacacataattttcagcgttgacttgattagttctaccagcgctctcatggcaaaaatccgtttggctccgctaatagggttaatcttttctaacttaggctgaagagcctccgtggaaaaaagaataccaacctgcatataattcgctccgagcgcagcaataaaagctgcgagcataacaggacctgctgcaagggctattgcaggaagaaggtgcttaaacatcgcaaatacgcgctctgccgtcacttcctcaagcatatacgtttgaaaagcttctcttaacaacttcatcatttgctgtaaaaactgtttggctccaaacaaaaaataaagaaaaaccattaaaaggatgagcgcagttgtaacgtcttgacttttagctacctgtcctttttttctagagtcttgcttttttttaggtgtagctttttccgttttttctcccgcgaaaaattgcaaatcaacttttactaaaaacaaagctacacccctcctaatatgcggatcgtcgcgcgcatcgcttctatcatttgttcaaatatgatttgcatcatataaaacatgctccccatcacgacaatcagcaaaataaaggcaacaataatttttaccggaaaccccactacgaaaatatttaactgcgggacggttcttgcgacaattccaagcgcgatatcgactaaaaataatgaacctaccaaaggcaaagacatttgaacagctactaaaaacatcgatgaaaaaacagttatgatgtgtgtagcaaatgcttggcttcccacagggaaagctactttgtctaacggaataattaaataactattatagatgccgtctattaataaatgatgtccattggtcgataataaaaataggagagcaaatacatataaatattgacctagtatcggactttgcgcccctgtctgcggatctattacgttggcaatcgcaaacccaacttgaaaatcgatgagacctccggcaatttgaatagccataataaatacatacgcagtcaaaccaataaacaacccaacagcacattcctttactactaaaagtacaaactgtgcatctaatgaaacgacgggtaaatcaattgttgtcgcaataatgacggatagtgaggcagacaaacctactttatgaactgcgggaatcgttttgtatgaaaatagcggaaccgtaataaaaaaagacgttacgcgcactagcactagtaaaaacgcgggataggataagatcaactgactcatagctatcctacgtaccgatacagatttgaaaaaatttcatatgtaaatgaaatcatttttgataacatccacggaccaaaaaatacaatccctactaagaccgctacaatcttaggaacaaaagcaagtgtttgctcttgaatttgggtagttgcttgaaaaatactaataatgagcccaactacaagggccagcagcaataaagggccagatacaattaagatcgtatatacgcctttttctgctaacgaaatgacaaattctccattcattgtctatcacctattgaaaacttattaataatgatttaacaactaaattccagccgtcaaccagtacaaatagtaaaattttaaacgggagcgaaatcataacgggaggaagcatcatcattcccatagacatcagcacgcttgctataatcatatcgataataagaaaaggaataaaaatcataaatccaatttgaaaggctgtctttagctcactgattgcataagccggaacgagcgcggttaagggaatatcttgaacagaggatggtttatctatatccgcatattctaaaaaaagagctaaatctttttgtcttgtatgggcactcataaattctttcatcggttcagctgctttttcataggcttgattcagcgtgattttttcttttaaaagcggctgaagcgcctgttcatttacctgagaaaaagttggcgccataataaaaaacgttaaaaacagcgataaaccaactaatatttgattaggaggcatttgctgtgtcccgagcgatgtacgtacaaatgacagcacaatgacaattcgtgtaaagcaggtcatcataattaaaattccaggagctaccgaaaacaccgtcagcagcaacaaaagctggacagacgttgaaatatttgtaggactgctcgagttaaagagattcatcacttcattcatcgttctttttgttcctttctaactctttcagtacgttttgcctttttattttcatttcattcatttctcgctgaaaaagctgctgaaaagaatgactagatttctcttcttttttagaagtcaatttttctaaaaaagacggtagtacgactttatattcgctctcgtttttctgttgttcctcatactgcgtgagcagctgctgtttctcttgccctgtaatttctgaaagaagctgcacattttcaccgactccgataataaaaagctgatttccaactttaactacttgtacagatttgctgcttccaacatttgtaccacccaagttttgtactactttatttttttgcagcagccttccttttttatttacaaattttaagagcgcaaaaagcagcccaattacaagtaaaaacgcgaatatcatcttcacgatatctccagctgaaagcgtaggcgtcccctggagttcagttttttcttttgaatcagtactctcactctctgaacacttctccgttttttccaaacattcttttacggatgcagatctactttctgcatagacgatttgatttgatcctgctaatacgcttattaacagcgcagcaattacgaactttcgcagcaatgtctgccacctcttacttcaatatagtgtaagattagcgggaaagccccgccaatctgttgtttatccaattgcttttgaaattgcctctaatacacgatctgcttgaaaaggcttaacgataaaatcttttgcccctgcttgaatagcatcaatcaccattgcctgctggcccatggctgaacacataatcaccttagcatcaccttttatggttttaatttcttttaaggccgtaattccatccatttcaggcattgtaatatccattgtgacaagatctggtgcatgctctttaaataactccacagcctgctggccatctgccgcttccgctactacttcatatccatttttcgttaaaatatctttgatcatcatgcgcatgaatgcagcatcatctacaattaaaattcggtttcccatctctactcctcctaaaaatcattactttagtttgttaatacggtctctttgactaataatatcggttacgcgaacgccaaaattctcgtcaatgacgaccacttcgccttttgctattaatttgctattaattaagatatctactggttcgcctgctagtttatcaagttcaatgattgcaccagaagataatgctaaaatctcttgaaccgttcgcttagttcttccaagctccacggtaacttgaagcgggatatcaagcagcatgtctaaatttcgtgaatccccttgaggagaagacatgtgctcgaactctgaaaacgatgcgggctgaacatcaactggtacatgaacagattctgcctgctgtgtttcttcatgctgtatgtcttcagctgccggcggttctgtttgctttccgttaagatctgattctttttcaatagaagctgccgtatcttctgaatttggaattaagagctcttcgaccaaactttttgcgaacggtatagataaaagctgcataatattcgaatcgattaatgtgcctaccttcaaattaaaagagacctttacaaagacgtcatcttggggaatcagctctgtaccttcccctttttgaatatttaaaatatctaaactcggcggagagatatcaattttcttttgaaataccgtggacatagacgtcgctgcagaacccatcatttgattcatcgcttcctgcactgcactcagcttaatttcatccatgatttccgtcggattctcacccgttccaccaagcatcaaatctgaaataacagctgcatcttcatgtttaataactaacaaattcgtaccagaaaagccttctgtatactgaacttgcacagcgacatgaggatttggaaattcattcgtcagctcttctttatatacgagcgatacaaacggtgtggtaatatcgactttttgattcaataaagccgatagcgctgttgctgaactgccaaacgaaatatttccaatttcgccaagcgcgtctttttccatttccgtaaagtaatcgtctacttgacttgacttattcggctctgaaaactcgtcaagtgaagaagttccttttaacaacgcatcaatttcatcttgcgaaagcatgtcatcgttcattcctttcgttcctcctcttaacatcatctagaatttgcacagcaactttccgcctgacttttccaggctgtgcaataaatttaggttgttctccgacgtaaatagttaacggattatgaacgcttgtttgcagtcgaataacatctcctgcatctaatgctaggaaatcttcaattgaaatatccgcttttcctagctcggctacaacctgcaattccgcaccattgatttgttcctttagctgctcaacctcttgtacattaggttcttttttcgaagattgcatccagtaatgaacggacagtttggacacgataggctcaagcgtcacgtgcggaatacatagattgatcatgcccgtttcatctccaatttgtacgtttaatgaaatgacgatgacaatttcatttggtgaaattacctgcaaaaactgagggttcacttcaaactctgatgtttcaggttcaatttccgcaatagaactccaagcttctctcatactatctaacgttttctctaacaagtttcgaaccaagctcgtttcaatttccgttaagttactaattttcccaccgctctcgccttgtcccccgagcaagcggtcaagcatcgcataggcaatgttcggattgacttccataatgatatgcccttctaaaggagggacggctatcacatttaagatggttactttcggaacagagcgaatgaactcctcatacggaatttgatctactgatacaacggacacttgtacaacgttacgaagctgcgccgaaaagacattgatgagcatgcgcgcataattttcatgaattcgcgtcaaactgcgaatctgatcttttgaaaaacgcagggcgcgtttaaaatcatatgtacgaatacgctgttttttattttctttttttagctcatccgcatccatctctccggttgataacgcggataatagggcatcaatttcattttgtgataatacatccccagccactagcttccctccctttttctttactgcaacactttagacgttgtataaattttaacaacatgtccgttttccattaattgatcaatttgctttgcaatatctgtttctaacgtgctgagcccttgcgttccttcaaaatcttgagcactcatatctgagagccttttgataataatgtctcttacttgaaaatctcttttttgaagctctgccgctgcttttttactatccatttgaattttaaaagagatgctgatgtagttattgctttttagatttgttttaatatccgttacatctacagaagctttaatcacatcgtcgatagatggacctttttcagtacttgcctgctctgtatactttagcgtcacgataacagcaatgcttcctattaaagtaagagaaagcatgataataatcatcttactaattagcttatttttaaacacactttattcctccgtcgtttgctgcagccctaatacgttaattcgctgataatagcccgtcactttctcattcacttcttcaactgaatcctttaccactagctttttgttattcgttagcgtaatggtcgtatcaggaaatgcttcaacctgctcgatgtagagtgcgtttaacgtaaatgttttgccgtttagccttgttaaagtgatcataattaaccggagtaatacctactccttcctcccgcctatcgttttagattcactagctcttgcagtatttcatcggatgttgtaataattcttgtgttcgcttgaaatccgcgctgtgcaacaatcatatccgtgaattcttccgataaatcaacgttggacatttcaagggcgcttgagacgaagcttcctgtgccgttggctcctggagctcctactaaaggacctcctgagtttacgctttgagcaaataaattcccccctgctttttgcagtccttcattatttgcaaatttagcaagttcgacagtttgattactggagatgttcccgttagcatctatgatgttaacctttccatctgctcctatactgtagctcttacttgttgaaggaatatttatattccctcctccagttttttgcacgtacagtccatcacccgttaccaaattaccgctgctatctaaataaaaattccccgctcttgtataataatttgtgactccatctcttactacaaaataaccgtctccagaaatagctaaatcaagcggacgccccgttgactgaatgcttcctgccgtttgaactgtatcaattgtgccaatttgcgaacctaatccgacttgtttagcattaacacctccacggttagctcccggtgctgttgctcctgctacctgctgacttactaaatcttgaaacgttgtacgtccttttttatagccgtatgtattaacgttggcaatgttatttcctaggacatctaatttagtttgaaaatttttcatgccgctgattcctgaatacatcgaacgtaacataaaatcactccttaaatttggttagttaactgcttacttctaagatatcgtttagcgaaagtaccgtatgattttcatcgttgatcgtaaacgatatctcattgtttttgacggatgctgttaaaataactccttgctttttatttccttcttcatctaaccatgcagcggttttaccaattaattcgcttccttttaaaataggagaagcctgagactgcgttaaaaacgtattgagcgatgtgctcatatttgtcatttgttcaagggatgaaaactgagccatttgagcaataaagtctttgtcttgcattggattcattggatcttgattttgaagctgcgcaatcaaaagcttcaaaaagtcatctttgccaagcgagctgtttcccgtttgcttcactggtgtgtccctattgcttaaatacaagtcagacgtaatttcatttgtcattgttatcacctatacgttgtagttaatgagcgctgcttcaaaagaagatagaaaggaatccgattcttccaattgttgtgaatcttgatcttcttcttttttaaacgcttctttttcctgtctttctttttgctggtcgttttcattgttatacgacatcgcttgttctgacagtagcacatcgattttatcaattgatacatgctgagacgcgagaccgtgccgcaaagttgaaaggttggcgtccaataactcttttgtttttgctgacgatacgacaattcgcgcaaccgtttcactgtctttctgaagcatttcaattgaaatcgcacctagctgttttggaaataacttaatgaaaagcttggatgttccctcttcagtactgatcgaagctttactccatattttttcaagctcgtttaccaaattgctagactgttgatagtcagattttgcttgccctagataaatagagaactgctgaagcttaggcatttctccacttccaaaggatgatggctgattctctactgtcgctccggttgtgtttgtaactgcagaactttcgctattttttaaagagctatttgtatctatactttcgctgtgtaataccacatcttttttccatggaagctgattgaaaaacggtattttttcttctttacgaaaagcggtcatatttctcacagaactttctgaagctgtatgaacagcgtccacaccaacttgatcaaccgatacatgctgagacgtgagagcttgtcgtaatctaaaaaggttagcatctaacagctcttttgttttcactgaggatacaaccacttgcgcagtcgtttcatttttttgctgaagcacttcaattgaaatcgtacctagctgctttggcaataacgtaacgaaaagcttggatcttctctcttcagcactgagcgaagctttactccatattttttgcagctcgtttactagatcactagactgttgatggtctaatttcactttccctaaatcaatagaaaactgcggcactttttcttctttagcaaaagcggtcatatcttttacagaactttctggagctgcttgaacagcaaccacatcgacttgatcaaccgatacatgctgagacgtgagagcttgtcgtaatctgaaaaggctggcgtctaacagctcttttgttttcgctgaggatacaaccacttgcgcagtcgtttcatttttttgctgaagcacttcaattgaaatcgtacctagctgctttggcaataacttaatagaaagcttagatgctctctcttcaatactgatcgatgctttactccatattttttgcagctcgtttaccaaatcgctagactgctgatggtctgattttgcttgccttaactcaatagaaaactgcgaccctttttcttctttaccaaaagcgttcatatctgtcatagaactttctggagccgctccaacagcggccacatccacttgatcaaccgatacatgctgagacgcaagagcttgtcgtaaactgaaaaggctggcgtctaacagctcttttgttttcgctgaggatacaaccatttgcgcaaccgtttcattttcttgctgaagcacttcaattgaaatcgtacctagctgctttggcaataacttaatagaaagcttagatgttctctcttcaatactgagcgaagctttactccatattttttgcagctcatttaacaggttgtcagactgttgatgaccagattttacttgccttagatcaatagaaaattcttggaccttaggtacttcattagatttaaaagatgatggattattttctaaggtcgcctcggccgtgttagcagtgaaagaaatttcactatccttttttgaactatccctatccatactttcgttacgtaaaatcacatcttttttccatggaagctgattcaaaagcggcactttttcctctttatgaaaagcggtcatatctcttacagaactttttggggctgcttgaacaacggcgaagaaatcagctgagcgcttttcatgtaaggtatcggttaatacacgtggttgtttatgaattttctctattttttcagcagcagttttctgcaaaccctcaagctgcagatccgaaagcttcactgactgcagctgcggtttttgtagttcttccatcagctgagcaaactctgtttgaaaaacagctgacgtatttttacatagttccagcaaagtagaaatagaagttaaatactgttcttgactgtctgtttcaggtgaaacaggtgcatgctgcatgtctgttaacacgtgctgcagctttagaagcggctgttccaaatctagactacctggaatactactgatcatctcggctagatgttcgtacaagacagatggttcatcctcttcatcttctgcttcgcttaactgaattgccattaacccgaccgccttgaagacgtcttgatctaccgtttgtttatcggatgatttctccccgcgcgttaaaggctgcgcatctagctgcttaagctgctgaacaacttcttcaaaaaaaccctgagtctgaataacagctgctttttcattgcagtttacctttgatgcagctgctggacgtagtgaaatttccactgttttcacctctgcttttattcctcaatctgatctgttaacaatgtcgtatagcgtgcagctacttttggatccattttttctaagattgctgttcttgtactcgctttgaactgcttaagcatcgcgaccgctttgtcttcttttaattcggcaaagataagtgctgcatttttaggagacatgttttcataggtagcaatgacatctttttttgccagctgattgttcttttgttttttcgcttcatcatcggctttttcttccatatcgcgcatttcaatttttagttcatccatttgacgatcttttgtagtgatcgttttctcataagctgcgatttgcttttctttcgtgctcaacttcttttgaaggctatcaacctgcttttgtatttcttcattgctttcttgaatattttcatttttttgcgactgttcacttgatacaaacggaatggcgtgtgtaatacctgaaactttatcatttacattaacgcctaaaagcgtcagaacaatataagccgccaagatgaggaacactgccggaataaagattaaaaataaaaacacttggcttttactgtaagacttttcttcttcgtactcttctcttaactctttttgattagccatgttttccacctaattcctatgcagcatatactgctgtagcgacagctcatccatttgcttcgcttctaactgtttttccgcggttatataagaatcgtagtctctcttttttaacttttcatacttctttacttctatgttcttttcttctagcttcagtttctttaagttcatttgctgtcttgcaaacatgacctcttgttgcagcctctcaatcactcgttcggcacttgttaaaaactgctgaaatgacgtaatttctaaaatagaaagcccttgcttcattttgcccgtatgctgttcaatgagcgtttctttttcttttaactttttataaagcttttcacccgctgtttcaaactgctgcaatgattgattatattgagatagcagttcatctttttcatttgacttgattgccattattttagataacctaaattcatatgccatatttactcacctttcacaaacagttcacagagctttgttacacttgtttcaaatgatggatgttcgttcattttttgttttaaaaatgcatcaatgacaggatgatagtagatggcctcatcaatgtaagcagaagatcctcttttgtaggcacctatgttaattaagtcttcagaattagcataggtagccattaatgaacgcagtttttcagctgcttctctatgccgttcacttacgatatggttcatcacccgactaacgctttttaagacattgatggccggatattgacctttattggccagctcccggtctagtacaatatgtccgtctataatgcctcgcaccgtatccgaaatgggttcgttcatatcatcaccgtctactaatacagtgtaaaaagcagtaatagatccatgttgattagttcctgtacgttcaagcagccttggcaagctagcaaaaacagatggtgtataacctttggtagtcggaggttcacctacggctaatccaatttctctctgagccattgctacacgggtaacagaatccatcatcatcatgacgctcagtccctcatctcgaaagtattcagcaatagaagtagctgtatatgctgctttcattcgaaggagagcaggctgatccgaggtagcaactactacaacggaacgctttaatccttcctctccaagatctcgctcaataaactctctaacttctcttcctcgctcacctacaagggcaatgacattgatatctgcttttgtattgcgtgcaatcatcccgagcagcgtacttttcccaacaccgcttcctgcaaaaatacctatgcgctgcccttgacctactgttagcaaactatcaatcgttcgtacccctacttcaatcggctgttcaataggcggacgctctaagggattaggggggtcttggtcggttaaaacaaacggcaaataatgagaaagttcagacccgtctaaagggttccctagtgaatcaagcacttgacctattaactctttccccacgcttacctgcagaggtttttctgtcgtttccactaggcagccaggtccgatatatcgaacagacgtataaggcattaaaacaacgtgctcaccgttaaaaccaacaacttctgcacgaattttatctcctcgttcactaagatgaataaagcaaacatctcctattgacgttctaggtcctttagattcaatcatcaatcctactactcggctgactttcccgtaccgtttaaaagaagatgtgcgcgggatttcatgaatgagttgtgcgactttcatgtttactctcctctaacaaacgttcttttaattttttcttcatttccgttaactgactatcaaaagacgcaacaagacgcccataagaggaatcgatgacacaatccatttcctgaagattttcatctgcataaataaatagccccgtttctccgtttaataaatcgaacagttctcgtttatgttcacatacatatgcatattttttcggagaaacaaaaagctggatttctttatgttctctaacttcttttaaagacctttcaacaagtgataaaaatgattcatctctttgaagccgctcatttaaaatcgcttcagctagggtgaaacctaattcaaagatgacttcttcagattgatttatgtattcgtagtactgattctttgtttcgtcaacaatgtttcgcgacatggctaatacatgctcatactcttgttttccttgaagcagcccttcttcgtatccttcttcatagcctcgctgttgttcttgttgaaacagcagcaccttctcttcttcccactgctttttcaaacgttcaacttcgttttgagcttgtttgcggtaagcatctgcctcggcctttattatttcagcttcactgtgcgcttgttcaataacgtgctttgcattttcttgctgaagatgttcttctgtgggctcatcttgtaccggaaagccaaatggaatgacttgaatgtgctttgcattttcgtctgaaagtttattcgtataagttgatttaatgatattagacaataatatcgtctcctccacctcgagctagtacaatttcaccagcatcttctaaacgtctaattgcagcaacgatacgtgactgagcttcctctacatctttcaaacgcacaggacccataaattccatttcttctttaaacgtttccaccatacggctagacatatttttaaaaataatagattttacttcttcacttgctacttttaagctcaacaataaatcatcattttctacatctcgtatcacacgctgaatagagcggttatcgagcgttacgatatcctcaaatacaaacattcgctgcttgatttcttctgctaatgccggatcttgaatttcaagcgtatcaataataattttttcagtcgctcggtctactccatttaatacttcaactactgcttctaaaccacctgtttgggtatagtcttgggtaacagtagcagaaagctttctctctaaaatttgctccacttcattaatgacttccggagacgtacttcccatcgttgcaatccgtcttgcaatatccgcttgcctttcctgaggcagtgatgataagatttgtcctgcctgcggcggctctaagtaagataaaataagggcaatcgtctgagggtgctcatgctgaataaaatttaacaactgcataggatcagcttttctggcaaagtcaaacggacgaacttgcaaagaagaagttaatcgattgataatcatcatagcctgctctggtccaagtgctttttctaacacctgtttcgcatagcttactcctcctttttcaaggtagttttgagcaagcgttatttgttcaaactcatgaagcacagcttcttttagagacggctctacttttctcactgaagaaatttcaagcgttagttgctcaatttcatcttcactgagatgtttatagatagaagctgatacatccggaccgagagaaatcaacaaaattgctgctttttgctttccagttaactcatttttttgcatagcctttaccattagctttcctcctaatcctcactaatccatgttcgcagcagttttgcaaactcttccgggtcttgcttcgctaacgtttcaagattgctttttgtttgctgttcagcacttaaaacaggagctttttgtgccgcttcatatgcttcaaaagtttcatcgtactcttcatcatattcctcttcatctaagtcttgacgccttttcctaaccaacagcacaataagaacaacaataataagcagcagtgctcctccggttatatacatccacaatggaatcgaacttgctgtgttgtcagctgtttcttgtccattaaacggctgaacggaaacggtaatcttatcgctgaccgcgttatccgagagggctttcgtatttgcatcttttgaaatagaagtacggacaattgtacctaacattttttgaacgtctgactcaagcgtatcggaaacttgtgatttcccttttgcattggacggatctatcattacttgaatgccaaggtcttgaattttgtatggactttcgacgatttctttatgaattcgattcacttcataattaattcgttcttcgtttttttcgtagtctccgtctccacttgttgtactagatgagtaatttgttgtatcttcttctcctgttccagcaacgcctccatcttgagcgtttttaccagaaaatgtttcattaattttttcagcgctaacggcaattccttgcatattatctttatcaacgggctctactagcttttcctcgcgattttcctgtgtaaaatcaagatctgctgtaacagaaaccattactttgtcttgaccgaccagtcttcctagcatttgctgtacttgacgctgaatatctcgctcaacttcttttttcgcttcgttctgcgaagcaaatgagctagaagctgaattcgtttcgttaccttttaaatcaaagtactcaaaatattggttcatgatgacgatattatcggtaggaaggtttggcacacttttggatactaaatgataaagagatttaatttgctgatcatcaaatttataaccagcctttgtattaagcacaatcgatgctgatgcttctccctgcttttcattcgcccagacgctttcattgggaagggtaatcatcacttttgcatcgttgactccttgaatgtttttcattaagttagccaattcagtttgcatcgcatcgagttttaacacatcaaattcattatctgtcataccaaagctcgcatttttcccaaaaaacgaatagtcgatacttccgctatcaggaattccttgtgcagctaaatcaacttttagcgagtcaacgctttgttcaggcaccgaaatggttgttccattatcagagatttctgaaggaacgcttctagcatcaagctctgctttgatttgtcctgtttcttgagccgatagattgctataaagagggacaaatttatccttgtttaaaaaaacagatgctaaactaatgactagaatagccgcaagaggagcagcgataagggctattttttgtccttttttgcggttattccaaaagactttcatcttatctcgataaagagctattctttcattcatggtattcctccggttattactattttcattttctttaataaccgctcaattacatttgcattctcatcatttcctgataggcttcaacagctttattgcgtatttcaagagccgtttgcatcgtaatacttgctttttgagcagtaatcattacatcttggagttcgacgttttctcctttagcaagcttttcagtcactatatccgaagcgcgttgagtattgtttaactcattgattgagtcttttaaaaacgttgaaaactgttgagttgtttgtccagtgctagtagaagctgctgtttttgctattgctatttgattgctgataccattaatcattttatcgctcctttatttcccaatttctaacgcctttgttaatatacttttgtttgtattaaagaccgtgacgtttgcttcataagatcgagtagcactaattaaatccgtcatttcttttaaaggatctacgttcggcatctgcacgtacccttggtcattcgcatctggatgcgtcgggttatatactaaattaaaaggagtattatcttctacgatatctgtgacttttacaccattgttttgacttttattgatttcggagtgtaagagggacgaaaaagaaggcgaacgatcagactgcatgacaaccatttttcttttataaggctgccactcaccattaacgtacgtccctcttgtcgtttcagcattcgccatattagatgaaacaacgtccatccttaaacgattggcagttaaagctgaagatgtaatattcatattttgaaaaatagtcaaacttatttacctcctctaatgactgtttgaagagaattaaattttccatttaaacgatctactagcgcctcatagtaaatttgattttcagccatatccgccatctctttatccatatccacattatttccgtttgcttgataagaagtgtttccttgctgggtaatcatcctctgggatgaattggaaaatgggatatgttttgaatcagtctgatatgcttctaactcgttatgtaataaatctcgaaattcactcgtacgcgttactgttttcgatttataatttggagtatcaacgtttgcgatattttgtgcaatcgtctgctgcttttgtgacgcgtagctaattccattttcaattgtttgaaaagtagttgaaaacaaactcaattcttacacctgcttatctattctatttttctcaaaatgagacaaatttcgactttagtaccatagaacttattgtaagaaaaacttcatgcaatgtctatccttttttaagaacttttggactataaaccaaaattttcattcgttttccaagcatattttaacatcaatgctatactttagctctatttttttaatttaaaatcaaaatatataccataagtcctgaacaatatgtaataaaagtaacgatttgtaatcaactagtatctttttactatttgaagattctataatataatttttagatttttatatgaagtttgttaaagttttataaaaatagtgaacgaatcgtcttaacccacagcgaatctttttgttcataaacttagttagattttaatttttcaagctctactaagaatttgttgttaagaactttaatgtaagttcctttcattcctaaagaacgtgattcgataacgccagcactttctaatttacgtagcgcatttacgattactgaacgtgtaattccaacgcggtcagcaattttacttgctactaatagtccttcatttccatttaactcttcaaagatgtgctcaatagcttctaactcactgtatgataatgagctaattgccatttgtacaacagctttgctacgtgcttcttcttcaatttcttctgctttttcacgaagaatttccatacctactaccgttgccccgtattcagcaaggattaaatcatcgtcttcgaactgacggtctaaacgagatagtacaagcgtacctagacgctctccgcctccgataattggaacgattgttgttagtcctgcatcaaataagtctttattttcaactgggaaagctgtatattgactttcaatgtttaagttagaagatgtttcttgaatgttaaataagctttgagtatattcttctgggaactggcgtgcttctaacatatctttcatgcgcgcattctcaatttgctgtttaacagcgattcctaataatttaccgcgacggcttactacgaatacgtttgattcgatcacttcgcaaagtgtttcagccatttctttaaagtttactggtttaccagctgctttttgtagcattgcattaatctttctagttttccctaataaatccattagtactcttcctcctgcgatttcagttctataaaataaattgactcaaatctttgtttttagcgattttttctaatttttcttccacgtactgcggagtaatcacaattttctctaatgttacttctggtgcttcaaacgataaatcctctagcaaacgttctaaaatcgtatgaagtcttcttgcaccaatattatctgtatcttgatttacctgatatgcaatttctgcaatcttacgtatagcatcgtcagaaaattcaatttgtataccttcagtttccaataatgccgcatattgctttaataacgcattatctggctctactaaaatgtttataaaatcttcaacggttagcttcgttaattcaacgcgaattgggaatcgaccttgcaattctggaattagatctgacggttttgatacatggaaagcaccggctgctacaaataaaacatgatcagttttgactgcgccatattttgtaacaatcgttgacccttctacaattggtaaaatatctcgctgtacgccttcacgtgaaacatcagcggaagatgaattaccacttttctgagcaattttatcaatttcgtcaatgaaaataattccgtattgttctgcacgattcacagcttcttgcgtcacttcatccatatcaatcaatttttgcgcttcttcatttgttaatacttttcgtgcatctttaacagtaagtttgcgctttttttgttttttaggcataaaattgcttaaggcatcctgcatgttcatgcccatttgttccatacccgaaccttgtaacatatcaaacatagaaggctgttgctcttctacttcaattgtgacataatgattttcaagctctcctaaagcaagctgatgagcaatctgcttgcgcttcgttgcaatattcgtttcctcatcttgatcaggatccgcatcgcttgactgtgtaccgtttgaaaaaatcatttcaaacggatttttaaacgattgctgcttctttttgctcggaacaagaagctctactatccgcttgtttgcattttcttctgcgcgatcacgcacgccgttcattttttcttctttcacaagtcgaactgacgtttccactaaatcacgaaccattgattctacatcgcgccctacatacccaacttccgtaaattttgttgcctcaaccttaataaaaggtgcaccgacaagcttagctaagcggcgtgcaatctcggttttacccacacctgtaggaccaatcattaaaatgtttttcggcacaacttcatcacgtaaagattcgtctagcagaccgcgtcgatagcgatttcgcagcgcaacagcgaccgctttctttgccttcgtttgaccaataatatactgatcgagcttttctacaatttgtcgaggtgttaaatgagaattcataaaaaaatcccctttcctacagttcttctacaataatatgatcatttgtataaacacatatctcacttgctacatctaaagctgcttttgcaatttctttagctgttaaatgttcgcctgcatgttgttttaatgcacgtcccgctgataaagcataatttccgcctgatccaattgctaaaatgccgtcgtccggttcaataacttcacccgttcctgatactaacagtaagttatctttgttcataacaataagcattgcttctaactttcgcaatactttgtcacttctccattgtttagcaagctcaacggctgcacgctgaagatttccgttatactcttcaagcttcgtttcaaataattcaaaaagagtgaatgcatcagctactgaacctgcaaagccggcaagaacttgcccttgaaatagacgtcttacttttcgagcagtatgtttcatcacaacagcatttccgaacgttacttgtccgtctccagacatagcacattgaccgttatgctggaccgcaaaaatcgtagtagcatggaaagtagacaaattaactcctccttttatgcgcgaggatggtgattcatataaactgcctttaaacgatccttcgtcacatgtgtgtatatttgagtggttgataaatgttcatgacctagcatttcttgaactgtacgtaaatctgccccttcatttaacatatgagtcgcaaaagtatgccgcaaaacgtgtggactaatatgtatattctcagcggtcttctttactaactgatcaatgactaagcgtatgcctcggtctgtcaacggtgtccccttataatttaaaaagagcgaatgagtatcagaaggagccttttttaaaagaagctttcttccattatctatatatactctaagagcgtccttggcataacagccaaatggcacgtaccgttgttttttccctttgccatatacgagcaaagtttgaagtgaaaaatctatatcgctaagcttaatagatgcacattcactcactcgtattccggtggcatacagcaattctaatagagactgattacgctgccctaacggagttgttaaatcattcatttgaaataatttcacaatctcctcttcatacaggaagcgaggatttcgctcttcctttttaggaagggtaacgagcgcaaatggattatcttctactaattcttctctatttaagtaacgataaaacgttctcaagcaagaaattttgcgtgacatcgatctttttgaatactgcttttcatataggcgtgttaaaaacagccttgcatcagcatatgtaacactttgtaggttttgtatttgctcttcctgcataaaagacatgaagatacctatgtctttttcatagcagtcaactgtatattttgaatagtttttctcaatttgtaaatattctagaaaggaatttaatacatctttaacaaattccaatgttatcacctcacaagggctactaaatattatcacaattaagtagcccttgcaaacaattttgattattttgttgtaaaattctgaatagtttccaatgctcttttagcaagcgtttcatttcgttcttgtttgtttttgattcgcacttccaattctttgaataagccaaagttggcattcatcggctggaagtttttagcgcttgtatgtgtgatatagtgagccatactgccaatcgccgtttcctgcggcattacaaccaattcttcaccaagcacaagtcgagctgcgttcattcctgccattaatccgctcgcagctgattctacatatccttctactcccgtcatttgtccagcaaagaataagtcatcacgctcacgatattgatacgtaggctttaacaatttaggagaattaataaacgtatttctatgcataactccgtagcgtactacttctgcattttctaaacctgggattaagcttaatacttctttttgtgctccccattttaaatgtgtttggaaacctacgatattatatagtgtacctgctgcatcatcttgacgaagctgaacaactgcataaggtcgctttcctgttttcggatcttctaacccaactggtttcattggtccaaaaagcattgttttttctccgcgtgaagccattacttcaatgggcatacatccttcaaaataaatttctttctcaaattcttttaaaggaaccgtctctgcattgattaatgcttcatgaaaacggtggaattcttcttttgtcatcggacagtttaaataggcagcttcccctttgtcatagcgagatttaagatatactttatccatatcaatgctgtctttttcaataataggtgcagccgcatcgtaaaaatataaataatcttcacttgttaacgcgcgcagctgttctgataaatcttttgacgttaacggacctgttgcaataacagttggtccttgtggaatttccgtaatctcttcattaacaaccgttacgttcggatggtttttaacactttccgttacacgagcggcaaattcgtgacgatcaacagccagtgctccacctgctggaaccgcacactcgtctgctgaacgaataattacagagtctaataatcgcatttcttcttttaaaacacccactgcatttgttaatgtattcgcgcgcagtgaattactacatactaattcagcaaatttgtccgtatgatgagcaggtgtttgcttcactggtctcatctcataaagacgtactttcaaaccgcgctttgcgatctgccaagctgcttcacttccagcaagacctgctccgataacattaattacttgttcattcattgtaaatcctccaacttcatttctatcttttctatcattttccttattcattcacttgtcttttcttttttaacgagacaaagaaaatgcgacattactcaatgtcgctaataacgtttccattttagcacatgaagcaatgtcgccgcatcttatataactgctatttgtaaatttaaagtgtgggaattcatcccattctcttttactgctgagcttcctctttataatcacaacttgtacagacgacttgagttccttttttctgtttcttctccacaagcagattttcacatttcggacattttcttgcaatcggcttatcccaagatacgaaatcacagcccgggaatcgatcacagccataaaatgtacgctttttcttcgattttcgctcaacgatatttccttcttcacatttcggacactttacaccaatctcttttacaattggctttgtgttgcggcagtcagggaaattagagcatgccataaattttccgtagcgtcccattttgtataccataggtgaaccgcattcttcacaatcttctccggcaggttcatctttaatctccacttcgcgcatttctttttcagcatgttctaagcgtttttcaaaatcactgtaaaattcgtcaataacatgcacccattgaacattaccatcttccacttcatccaaatcgttttccattttagctgtaaactctacatctaaaatttccgggaaaaactccaatacaagctccagtacaatttctccaagttctgttggaacaaaacgcttgttatcgagcgctacgtacccgcgcttttgaatcgtgtcaagtgttggagcatatgtagacggtcgtccaatgcctagctcttctaatgtcttgactaaacgagcttcagtatatcttggcggcggctgtgtgaagtgctgcttttcatcgatgtccttagaataagctatttctccttcttctaaatctggaagaagattttctttttcctccacttgatcatcattgccttcaacatacactttcataaagcctggaaatttaactttcgagccgtttgctctaaatgttacgtccccatttttcaaatctacagccattgtatccataattgcaggtgccatttgactagcaacgaagcgctcccatactaacttatacagtcgatactgatcacgcgataagaactcttttacctctcctggtttacgaagagctgaagttggacgaatcgcttcgtgggcatcttgcgcgttcgaatttttcttttctttgcgcttttccgttgccacaaactgatttccgtatgcgttcgtaatgtaatctctagcttctgtttgagctgtttctgaaatacgagtagaatcggtacgcatatacgtgataagacctactgtaccttcttttcctaaatcaattccttcatataattgctgcgcaatcatcattgttttcttcgctcggaagttcagtttccgcgctgcctcttgctgtaatgaagacgtcgtaaaagaaggagccgcattacgctttcgctcacgttttgttactttagaaattgaaaattcatttccatctaattgtttaacaatgttggttacatcattttcattcgatagctctacttttttcccttgatattcgatcaactggccttcaaattggtcgtttcctttttgaaaagttgcttttaccgtccagtattcttctgggataaactttgcaatttctttttcacgatcaataattaaccgcactgcaattgattgaacccttccggcacttaatccttttttcacttttttccacagcaatggactgatgttgtagccaaccagtctgtcaagaatacggcgtgcttgctgagcatctactaaatccatattaattgctcgtggatgtttaaaagattctttaatcgcttcttttgtaatctcgttaaatactacgcggcagtccgatgcaatgtctacatccaaactgtgcgccaagtgccatgcaatcgcttctccttcacggtctggatcggctgctaggtaaatcttttttgcttttttagccgctgtttttagttcttttaaaaccgggcctttcccgcgaattgtaatatatttcggattgtaatcctgttcaatatcaattcccatttgacttttaggtaaatcgcgaacatgtcccatcgatgcttttactttatatttctttcctaaataacgttcaattgttttagcctttgcaggcgattctacaattactaggtagtcagacatctatttgttcctcctcaagaggtagaataaaatcttcattattattaaatatttggttcttgtttgtcaaatgtccaaaagataagtcatacgattttactacgtatctcactagtatttcataccatgcaagaatatgactgctttgaaacattcatcttatatacatcatttcatttgtaatatcagcagcgctttgcacaagttttgcccctaattggattaacttattcgttccacatgatgtttcttcaaaaatagaacccggtatggcaaatacttctcttccttgctgaagcgcctggtcggcggtaataaaagatccacttctttcttttgcttgcaccaccaacgtgcctcctgttaatccgctaatgattctgtttctgcgagggaaaaaccatttcgtcggcttcataaacggggcatattcagaaagcagcaaatgatgctgcgcaatttctcttgctaaattttggtttactcttgggtaaatattataaaaccctccgcctaaaactgcaatcgttttagctttttcagcgatagccagttcatgagcagcctggtcaatccctaaagctagtccacttacaacgacaaattcttcatgcagcatcggcttaacaatatgagtcagagctgcagttccatatgaagtggggttccttgttcctacaatgcttaagctttctggagcgtgtagaagagaaacctttccttttgcaaataatacccaaggcggatcataaatatggcgcaaaagttcaggatattcatcatctaggatggtgacacattgaatattctcagcgtcatatttatctagaatatctcgtattggaatagtttgcaaatctttttttatttgattagcacgttcaatcgagagagtcaatagtttttgaagctgtgatggagagtactcgtagagattttgtaatgaagaattctgttgaagtagcgtaaaaatttgtttccaattaacagatgacaatgtgctaaatgaattaatttttcccgtaaatcagacattctacaatctcctttttaaatggacaaaatagcccccggtcaaaggaggctatatgtcttctattaatgagtcttacactgctcgtaaatgccttgttcttttaacactttaataagtgtttctcccataacagatggtgtttcagctacttgaataccgcactcattcattgttttaatcttttcagacgctgtccctttaccacctgaaataatagcaccagcatggcccatacgttttcctggaggtgctgtttgaccaccaatgaagccgaccacaggttttgtcatatttgcttttacccattctgccgcttcttcttctgctgtaccgccgatttcaccaatcataattactgcatacgtatcttcatcttcattaaacgcttgtaatacatcgataaagttcgtgccgttcactgggtcaccaccgataccaacagctgttgattggccaatgccagcttcagaaagttgatgaacagcttcatatgttaatgtaccagaacgtgaaactacacctacatgaccttttttgtgaatgtaccctggcataattccaattttacattcttccggtgtaataacacctgggcagttaggtcccacaaggcgcgtacgttttccttccatataacgctttacttttaccatatctaatactggaataccttccgtaatacaaataactaaatctaaatctgcgtcaactgcttcaataatggagtcagctgcgaatgctggcggaacatatacaacagaagccgttgcacctgttttttcttttgcctcggcaaccgtattaaataccggaacaccttctacttctaagccgcctttacctggcgttacgccaccaacaattttcgttccatattctaacatttgctgtgtatgaaaaaggccaactccgcctgtaattccttgtacaattacttttgtatcttgattaataaatacgctcattcctatcccccagcctttctatttcactagtgaaacgattttttgtgcgccgtctgccatagattcagcagctgtgatatttaagcctgatttttgtaaaatttcttttccaagttcaacgtttgttccttctaaacgaacaactaatggaaggcttaatcccacttgtttcgttgcttcaacaacacctgttgcaataacatcacatttcataatcccgccgaaaatattaacaaaaataccttttacattttggtcagataaaataattttgaatgcttctgttactttttcagcagttgcgccgcccccaacatccaggaagttagcagggtcgcctccgtaatgtttaataatatccatcgttgccattgctaaacctgcaccgtttaccatacaaccgatattaccgtctagtgaaatgtagcttaagtcgtatttagatgcttcaatttctttagcatcttcctcttcaaggtcacgatattcaagaatatctttttgacgatacagcgcatttgaatcaaagtttaacttcgcatccaatgccataacgtctccgtcacctgttacaactagaggattaatctctgcgattgagcagtctttttcaacaaatactgtatataaacctgtcatgaacttaactgcttttccaactaattcttttggaatattaatattaaatgcaagtctgcgagcttggaatgcttgtaaaccaatcgcaggatctacatattctttaaagattttttcaggcgttttttccgccacttcttcaatttcagttccaccttcttcagaacccatcaatacaacttgagacgttgcacgatcaagaactaaaccgatgtagtattctttcttaatatcgcatccctcttcaactaacaagcgcttaacttcttttccttcagggcctgtttggtgtgttacgagggtctttcctaaaatatcttgtgcatatgtacgaacttcatctaagttttttgctactttgacaccgcccgctttaccgcgtccaccagcatggatttgtgctttcaccactgatacttgtgaacctaattcctttgctgcttcaactgcttcttcaacagtaaaagctactcgaccgtttggtactgcaaccccatattttctgagtagttcttttccttgatactcatggatattcatttcccatcctcctaacataatcaaccacaaaactatactgcacaaaatagactgcgctttcattgtataaaaataattgtctaattgtctactattctagtgaaaaatattgaaataataagaaaattgatatttttatggagatagtacttaaccataccttatgaagtcgatgaggctctgcggacgttaaacgtatggttgatcatgtaaatcaaccttcacaactgaagcgaactgaaaggaaaataatttacgaacttcacccgtagcaatacctccacttaaataggctatattctttttgaacctaaaatcccgcatgtgaaacatgcgctaaaaagcagggatatgctcgggtatcatgttctagtttacttggttttttatcggtgcaaaagatcggcggtgttctggcaaaattccatattgttggattgcttctaaatgttgttttgttccatatcccatatgtttttcgaatccgtatgcaggatagcgttcaccaagttctttcatcattcgatctcgcgtcacttttgcaataacagaacttgcagcaatcgaaatgcttgtagcatcgcctttgatgattgattgctgcgaaataggcaccggcagcttcatcgcatcaataagcagttcatcaggctgaacagctagaaattcaattgcttcagtcattgccttttttgttgcttcataaatattaatagaatcaatgacctctgcgtctataatacctataccgatagcgacagcgcttttacaaatttcttcataaaattcttctcgctttgcctctgataacttctttgaatccgtcaaaccagggagaaaaaaatccggcggcaaaataacagcagcagctactaccggtcctgctaacggtcctcttcctacttcatctactccggcaatataggttgctccctgattgtataattcgttttcatatgccatcatttcatcaaactgtttctttaagcgctcagcggcttcaaattgcctttgtttttgaataataacctgttgcacacctttacgctcatcttgcgcatataccttaaataaagcatcttccgggcttctcacttgctttagttcttcttttatttctttaatactctttttcattagctccaccttctttatatcaacattttcacgcggcacttttacataaaaaacgcctcatgctaaaaaggcagaggcgttttttgtttcagttcgcaatgtattgcttacagctgctgttcagcttcacttggatcatcaaatgtaaaggtgccaattttatccgttcgaatttctcgaagaacaagctcagccgttttatcgtaatccaccatgccgccacccattaaacagccgcggcgcgacccaattgcatcaaaaagctctacaatgtcttcagggatttcatttaaatcataacgctgctttaattgttctgggtaatggctagttaagaagcgcagcgcataaacagcgacatcttgcatatttaaaatggtatctttgatagcacccgttgtcgcaagcttatatccaactgtttcatcttcaaacttaggccacaaaatacctggcgtatcaagtagctccagctcatttcctaccttaatccactgctgtgcttgcgtcacacctggacgatctccggtcttggcgatttttttgctggcaaggcgattaatcagcgttgatttaccgacgttaggaatccctacaatcatcgcacggatagcgcggggttttttaactccttttgcgcgcatgcggtcaaacttctcttgaagaagttctttggaagacgaaacaatttgtttcattcctttacctgcttgtgcgtcaatagctaaggcataaataccttgttctttgtaataatctagccactgctgagtaacgcgcggatcagctttatccactttattcagcaatacgattctcggcttgttcacgataatctcatcaatcattggatttcgcgatgattgcggaatgcgtgcatcaaccagttcgtatacaatatcaatcaattttagcttttcagttacttgtcttctggccttggccatatggccaggaaaccattgaattgtcatattttactcaccttttatattttactttgcaaaacgcgcttctttaatcggccagtatacggcactcgttttaccaagcaccttgtccatgctcacaaagccaatctgacggctgtctttactgtagcgtcgattgtctcccatcacgaacaaatatccttctggcacggtctttttacccgttacgtcttctagcttaaagtcttcggttaaattaccgtcaatcacttcttttttatactgatctaaatagggctctttataagcttttccatttacatatagcgtatcatttcgatactcaatatgatcacccggcagtccaataatacgttttatgtaatctttttccgctgtagcatgaaaaacaataatatcaaagcgatcaggatcaccaatcttataggagaacttatttacaatcattcgattttggtcatgcagcgtaggcatcatagaaagtccatctactacaatcggtgcaaacaagaaatagcgaattacaacagctaacagtacggcaatggcgattgcttttatccattcccacagttcatttttctttcgagccatcttcagtcctccaactcttatgtcatacctttattttaaacgataatgtttgaaacgcctaataaataaatagaataaaaaattgatgacttgtacgtctattttttactgtcagagaacgaatcgttctaaaaaaacatttgaaaaaaggagcttgtataaacaagctcccctttactattatcgaatttctttaatacgcgcagctttaccacgtaattcacgtaggtaataaagtttcgcacggcgtactttaccgcggcgcattacttcgatttttgcaatttttggcgtatgaagtgggaatgtacgctctacccctacaccgtaagaaatcttacgtactgtaaatgtttcgctgataccaccgccacgacgcttaataacaacaccttcaaatacctgaacacgttcacgagtaccctcaacgatatttacgtgtacacgtacagtatcaccaggacggaacgtaggaagatctgtttttaattgttcttttgtaatctcttcgattaatttttgcatcgcgtgtttcaactccttccaacagacgctcataccaatgcttttcaatcattgcagcggaacatcgttataggtgaccagacatctgcccaagccacaaaatctatcttagcacactcttataccgtatgcaacagagtttatgcataaattttatggatttatgaaagctgattttcttcttttaattgagctactagtttcttttgctcttctgttagctccatcttttcaagcatatccggtcttcgaagcagcgtgcgctttaaagattctttttggcgccactgttcaatttttttatgatttcctgacataagtacttcaggaaccgttaagcctctaaaatcagcaggacgcgtatagtgggggtgctctagtaaaccggtactgtgtgagtcctgtacagctgaatgattattgccaaggacatcaggaagcaggcgaacaacgctatcgatcacaaccattgcaccaagctctcctccagttaatacatagtcaccaattgaaatttcatcagttaccaactgctcacgaattcgttcatcatatccttcgtaatgaccgcaaataaaaattaaatgctcttctgctgctagctcttctgcttttgcctgtgtatagcgttcgccctgcggacaaagcaaaactacccggggcttctcagctgttctagtcagcttttctacagcgtcaaaaataggctgaggcgtcaataccattccagcacctccgccgtaaggataatcgtccacattttgatgtttgttcgtagaatattctcggaaattaactacattcagttcaaccgcatttttttcctgtgcttttttcaaaattgattcaccaaaaacaccgtcaaacatagaaggaaatagcgacagtacatcaattttcattagtccaataacccttccattactgtaataacaatctctttttcatctatatcaatagattgtacaacgtcgtcgatgtaaggaataagaacttcttttccgccttttttaacaacccacacatcattagctcccggcgttaaaatttctttgaccgttcctacctctactccgtcttctgtttttactgtacagccaataatttcgtggaaatagaattcaccgtcttctaaatccgttagctgctcctcaggaattttcacttcgcagtttttatactgctcaacatcatttacgttttgatagccttcgaatgtaagcaaatcaaaatttttatgcctgcggtggcttgctaccgttacttctaccggctcgctttgcttttctttgaagatataaagtttatttcctttttcatagcgctcgtcagcaaaatccgtagttgatacaatacgaacttctccttttacgccatgggtattcacaatttttccaaccttaaaccatttcatacttcttcacctctatctaatctcaacaactttgctatcttttataataattgttttactttcttttatcttttcccaatcatcgccgatttttacctctactaaggcatcaagttccgtttcaacgagttcgctccctaaaggaagcttttctaattgcgtcagctgaaagttcaacacttcaattttttcaaggcgagcggatttttctttttcaaactgactatgtaataaagaagaacctttattggctttttccatatgctttaactgaaatttcagctgttccatttctttttcaagcgcctgcttgcggtttataaaacgattttcaagatcttgtttgcttgcttcagttaacacttgtttcacaaccactttttgaataatgttcaaaacgttccctccgctctcaatatagtgaccttgtgctttttacatgcatattgaaatagctgcttcttgctcgcaaaagacttactgtgatcaaaacgttcatcttatcataacataaaaaaagggcgaggttatccctctccctttttgattactcttgaattttcacatacacttttttaccttgctgtgatgctgctgcattcacaacagttcgaatcgcttttgcaacgcgaccttgtttgccgattactttgccgacatcttcttggtgaacagtaaggatgtacgtcacttgacgttcatcttcttgttcctccactttaacatcagctgggtaatcaacaagcggctttacaattgtttcgattagtgatgtcatctcgagtgaaattattttcctaatttagcattatggaatttttccatgatgccttcgttagagaaaaggttacgaactgtatcagatggtttagcaccattttgtaaccatttaagagctagctcttcatcgattttaacttcagctggttgaactacaggattgtaagttccaactacttcgatgtaacgtccatcacgtggtgaacgagagtctgctgctacgatacgatagaaaggagattttttagctcccatacgttttaaacgaatttttactgccattttataaagcacctccgaatatgtttcaacaagataatataatatcaaataggtaaaatgtttgtaaaggtttttttcttaacactagaaaaatattttattttctttggtttttcagtccgaatcaagcgttttatcatgaaaagaatggaagtttcataccctttttcttgccttttgacatatttgtcatttgtttcatcatttttttcatgtcttcaaattgtttaagcaaacggttgacttcttgtacagaacgtccgcttccttttgcaatacgctttcttcgacttgcattaatgatttcagggtttgttttttccgctttcgtcatagaacgaatgattgcttctacatgattaatttgcttttcatccacctgcaggtttttgagcccctttactttattggcgcccggaagcataccaattagctcatcaagcggtcccatttgacgcacctgagcaagttgatctaaaaagtcatcaaatgtaaatgactgcgtgcgcagcttagcttcaagctcttttgctttttcagcatctacatttgcctgagccttttcgataagcgtcagcacatcacccatacctaagatacgggaagccatacgctctggatggaatgcttcaatagcatccattttttctccaagaccgacaaacttaattggtgtatcggttactgcacgaatagaaagcgctgcaccaccgcgcgtatcgccgtctagtttcgttaatacaactccagttaatcctaattgcttattaaagctatccgcaacgtttactgcatcttgacccgtcatcgcatcgacaacaaggaaaatttcgtctgggttagaaagctctttgatctgttctaactcctccattaaattttcatcaacatgcaaacgtcccgctgtatcaattaatacataatcgtgatgctcttctttcgcatgagcaatagcttgtttcgcaatctccacaggacttacttgatcacctaatgaaaaaacagacatgctaagctgttttcctagtgtttcaagctgtttaatagctgccggacgataaatatctgctgctacaagcaatggattacggttatattttttacgtaataaattggcaagtttaccggttgttgttgttttacctgcaccttgaagtccaaccatcataattacagttggagcttttggagctactgcaatcttgctttgctctccgcccataagtacagttaattcttcttgtacaaccttaataacttgttgtccaggcgttaagctcttaagaacgtcttgacctacagcacgttcgcttacgcgcttaacaaagtcttttactactttaaagtttacatcggcttctaaaagggcaagtctaacttcacgcatcatttctttaacatcagcttcgttaacttttccttttccttttaacttttgcagtgtgctttgcaaacggtcggctaatccttcaaatgccatatacgccgccccctaatctaatttctcgagcgaatcaagaagagaagaaagcttactattcttgtgtaagtcggctgcaagttcgtctttcagttgttgaacaattgattgacgctcttgaaaccgttgaaataacaatagcttttcctcatattgttcaagcatttgctctgtacgttttatattatcataaactgcttgacgactcacatcaaattcttccgctatttcaccgagggaataatcatccaagtaataaagtgacatataacttctttgtttgggcgtcaacagcgcctgatagaagtcaaataagtaattcattcttgttgttttttcgagcatatgcacgctcttttcaaccatctgaccgcccccttgttaagtgaaaagcctttacatgttattagtttaactaggcgaggtttgaatgtcaagttttttccttaacacctcacattttcccacttaaaagagatggaaacataactaaattacttcaatttaaagacgaataaatatgaaacctgcgtcccccctactaataaaaaaatccgaacgattaatcgttcggatctcccttcaattaagatacttatatcccagcctctttttagattacgcctctttttctgtttcttcttctacagcattggcaaataacccatagatatattgctccgtgtcaaacggctgaaggtcgtccactttttctccaaggccaacgaatttaacaggaagcttcagttcgtttcgaatggcaagaacaattccgcctttagccgtaccatctagttttgttaacacaattcccgtcacgttcgttgcttctgagaatgttttagcctgacttaaagcgttttgacccgtcgtcgcatcaagtacaagaagtacctcatgaggagcaccaggaatttctcgctcaataacacgctttactttctctaattctttcattaaatttactttattttgaaggcgccctgctgtatcacataataaaacatctgcttttcgagccttagctgactgaacagcgtcatacatgacagcggcagggtcagagcctgcagattgcttaataacatccacaccaacgcgttctccccatacttctaactgctcaatcgcaccggcacggaacgtatctcctgctgccattacgacttttttgccttcttgtttgaatttatgcgcaatcttcccaatggttgttgtttttccaacaccgtttactcctacaaacaaaatcaccgttaaatcattttgctgcatattcagttcaccaatctgctcttcaccagattcataaatatcaattaatttctcagagatgactgcctgtacatcttgaggatccttaatattacggcgtttcacttccgattttaagtcatcaattaaatccaacacggtagccacaccaacatcagcactgattaaaatttcttctaattcctcaaaaaactcttcgtctacttgacgatagcgagacactagatcattcacgcgttctgaaaaagaattgcgcgtttttgataagccatctttaaatttttgggtaacagaatcggtttgcattgtaattttttcttttagtttcttaaaaaagctcattcgtaccaccctttcattctatgagttaaacatattgctttgattcttctaaacgaacagagactaatttcgatacgccagattcttgcatcgtcacaccgtacagtacatcagcttcttccattgtaccttttcggtgagtaataacaatgaactgtgtttgagtactaaatttgcgtaaatacgtagcaaagcgatgaacgtttgcttcatcaagcgccgcttccacttcatctagcacacaaaacggcaccggacgtactttcaaaatagaaaacaggagggcaatggctgttaacgaacgctcgccgcctgacagcaaccctagattctgcagttttttcccaggaggctgggcaacaatttccacacctgtatttaataaatctttcggatcggttaatttcaaatccgcttttcctcctccgaatagggaagagaacactgtaccaaattcattgcggatacgagtgaacgtatcagaaaaacgtttcttcatttcctcgtccatttcttcaatcacttgatacagggtatttttcgcttcgtcaaggtccgctcgctgcgtatttaaaaattcatagcgctctgaaacgcgttcgtattgttcaatagaacctaagtttacggttcctaattcatcaattgccagcttaatgagcttgatttttttcctcgcttcttgaatatctaatgttaaaggataattttcttttgctgcttcaaagctaatttcgtactcttctgtcagctgctgcagacggctgtctagctctacatcaattcgattgattttgacttcttcatcttttaaagcatccgcaatttgtttgtactgacgctgcagctcttttacaatcctctcttcgtcttcaagtttattctgggctttcaaccgctctgatctggagtcatccattaattttaacgtttctgtcttttcttttattcgctcatgcgctgcttcttcgagctgaagttcacccgagtcgttgctcgtgatttcactcgttaaaagagaaagatcatctgtagtttcagataaacgctgaatggtttgatcaagctcaaaacacactctttcatatttttcttgctgatttgtgaggaactgttcttttttcgcaagaagcacttttacttctgtaagctcatgttgaaccgtttctttagacgtttgctgtgtatgcttgcgtgcagctaactcttcaatgtttttctctaatacatttgcctgctgctgatttccttgcaaacttgtatgcagctcatcaattcgagcggacaagctcgtttgatcttgtctaaagctagcaatatcatgatcgtacatggttaagcggtcattcactgctttctcttcgatgtcaatttgctttacttctcggtcagattcctgctctttatctttcaagcgttccacaaatgcctgctgtttattaatttcctgctgaagctcctcaatctgtgactttttatctttcacatcttgctcgagcacaagcgtcttttgttccatctcttctatttttgccgtaatggcttccacttcacgctgacggcctaacaaagagttagacttttgcttcattgaaccgcctgtcatcgaaccaccggggttgacgacatctcctttaacggtcacaaaacgatagcggtgctgcacaagacgggcaagttcatttgcaccttttaaatcattgactacaataacggttccaagcaaatttttaataactcggtcgtaggtagcttcgtacttaacaagagatgaagcgattcctacatacgcttcatggctttctagcatagaaatagtttgagcgggaacataacggtcttttacagacgtcagtggtaaaaatgtagctctcccgtaaccattttgtttcaaaaagccaattgcctgacgtgcactttgttcgtcttgaacgacaatatgctgagctgctcctccaagggcaatttcaagcgctgtttcatactcttttgggacattaattagctcagcaatcgcgcctttgatacctgcaagcttctcatcacgcgcttttaatacttcttttacaccgtgaaaataaccttcatagtcttcttgcatctcttcaagcatttcttttcgtgattttgtctgctgcacgtactgataagcttgataaagcgtagactcttgtttgcgataggcttgccttaatgactcaagctgctctccttgctgcttatacacttgtacagcttgctgaagctcttgacgaaactgagcaagccttttgatcgccgcttcttttcgctgcgttaattcacggcgctgttctacgtattgctcgttggattttgttaaacgctgctctttttcaaacgtttgcattttttgctgctctaaaaatgaaatttcatttcgggcggatgtttgagcgttcgctaattcaaaatactcgcttttcatctgttcaagtttttcttctagattctcgctgtactgcctgaacagctgttcctgctcagtaagcttcaggcgtatctcttgtacttctttttgagattgctcaagatcttttccttcgctgtcttttgctttacttagctcttgatgcttatgagtatactcttttactaaacgttccagctgctctttattttgaaaggcatttttcttacgctcttttaatacttcttttttgccttctagcttttctacttcttcacttacatatagtagttttttatgtaaagagtctagttgttcatctatttgctgaatgtgcaaacgaagggtctggatttctccttcacgcgtgcgaatattcgtcgcgagagattcttcaagctgctcgtgctgagccatttcagcttttagtttttcccatttctgatgaagatcttcaacttcaaataccgtaacagccacatcaatgtgctctaattcttcttttttctgcaaataatcttttgcaatagacgattgaatctgtaaaggctctaactggccttcaatttcatgaagaatatctaccactcgatttaaattttcttgcgtttcgagaagtcgaagctccgcttttcgtttacgcgttttgtattttaatacacctgcagcttcttcaaagattttacggcgctcgtcagatttactgcttagtacttcttctacttttccttgactgataatcgaaaaagcttctcttccaagtcctgaatccataaataaatcgacaatatctttcaagcggcacggctggttgttaataaaaaattcactgtctcctgagcggtacacgcgccttgtaatactaacttcatggtagtcaagcgggagaaactggtcatcattttccaacgtcagcgttacgtcagccacgtttaccgcacggcgtgattcgcttcccgcaaaaataatgtcctccattttccctccacgaagcgatttggctgactgttctccaagcacccagcgtatggcatccgtaatgttactttttccgcttccattcggtcctactaccgccgttacacctggaacaaaatctatcgatactttttctgcaaacgatttgaaccctgcaatatctaatcgtttgaggaacatagaaatcccccctcacacttgtaatcttttcatagcaaatccccctttataacgaatacgttaagagggggatcattttatttcgtttgactcgctctaattttcgtaatagctacttgagctgctttttgctctgcttcttttttcgaacggcctacaccaacgccgagctcttcaccatttaacgatacgcgagataagaattcgcgattatgggctggacctttttcttgcaaaactttgtattctaactgtccaactccatcacgctgaatcacttcttgaagctggcttttgaaatccatcacatgagaaaaagcaccttcattaatttttggaaagacaactttttttagaatcgttactaccgtatcaagcccttggtctaaataaagagctccgataaatgcttcaaacacatcggccagtaaagccggtctagatcggccgcctgtcatctcttcaccttttccaagtaacactagtttaccaaaatccatttcatttgcaaaagtaacaagcgacggttcgcacacaactgctgcacgaagctttgttaactcaccttcactcatcgttggatattttttaaataaaaattgtgatacggttagctctaatacggcatctcctaaaaactcaagacgctcgttgtcttcatacggtcttctgcgatgctcattcacataggatgaatgtgtaaatgcttgaaaaagaagcgcttcatttgtaaactgaataccaatttccttttgaaactctgcaaaattttgcttgaatttcacgttcatctttcgatctcgatttgaatattgtttaggcataaaatacctccgcttacctgcttcaattgtttcgtagttttttcctaacatctctcattataaaacgaggtatcctaaaagatacactaccttttcaaaaaaagaggtctttttttgaaattcttaaaaagaagagaaagccccgctgtttaacggggcttttcatacatatactacagattaaatttggctctgtatgtaattaactgcatctcctacagttgaaattttttcagcttcttcgtcagaaatttcgatatcaaattcctcttcaagctccattacaaattcaactacgtctagagagtcagcacctaagtcttctttgaaactagattctagtttcacttcacttttgtctacaccaagacgatcaacaatgattgttgttacacgttctagtacctctgccattgttcttcacctcccctcaagtcattatagatgatttccatctaaaatactatggttgaataataaagtttatcggtcgcctagtaaacgtccctttgtactttatcaccaaattacacttttcgtaaagtgcattttttacatcaccattccgccgtcaacgtgaatcgtttgacccgtaatataacggcttgcatctgatgctaaaaacgcaactgcgttcgcaacatcctcaggctgaccgaagcttgcaagagggatttgctttaacatttccgcctgcacttcttcattcaatttatccgtcatgtctgttgcaatgaaaccaggagcaactgcattcactgtaatattgcggcttgctaattctttggcagttgtttttgttaaaccaattacgcctgattttgctgctacataatttgcttgtccagcattaccgctgacgccgacaattgatgaaatattaatgatacgtcctgcgcgctgcttcatcatttgacgagtaaccgcttttgtacacaaaaatacgccttttaagtttgtattaataacatcatcccattcgtcttctttcatacgcataagaagattatcacgtgtgattcccgcgttgttcactaaaatatctactgaaccaaatgtagaaatcgcttcttttatcattgcttgtacagaatcactttctgccacatttgcttgtacagcaattgcatccgttcctaatcctttaatttcatccacaacttcaagagctttcgcttcgctgccagaatagtttacaactactttagcaccaagctttcccagctcaattgcaacggcacgaccaattccgcgagaagcgcctgttacaaccgcaactttcccttgtaacatgttattctcccccttttagtgcgtcaatcgttgattttaatgatgtaagatcattaacagcatacacagccgcacggcgatttacttttttcacaagacctgataatacttttcccggtccaatttcaacaaatgtatctacaccttctgcaagaagtgtttcaactgtttcttcccatctcactggagaatacagttgttccactagcttgttttgaatatcttgactgtcagtaaccggctttgctgttacgtttgctataactggaaccttcgcatcgctaaaacccactgtttctagcgtatcacgtagtttttcagcagctggcttcattaaactagagtggaacggaccgcttaccactagaggaatcacgcgttttgcccctttttctttggcaagagctccagctttttctacgccatttaccgtacctgaaataacaatttgacccggacagttaatatttgcaagctgaacagcgtcgccttcgcttgtaatttgagcggtaacggcttctaaatcttccgctgacatgccaagcactgctgccattgtaccttgacctgctggtacagcttcgtccatatagcgacctcttttgtgaacagcaaccacggcatctttaaacgataaaacctcagcagccacaagcgcactgtattctcctagactgtgacccgcaacaaaatcgggtgtaattccgctcgttttaaatgcttcaagcagcattgtactcgttgctaaaagagcaggttgagcgtgataagttaaagtcaattcttcttgaggcccttcaaaaataatgtttgaaagattgaatcctaaagcttcgtcagccatatgaatcagctttttcgcttcttctgttccatcatataaatcttttcccataccaacagtttgtgacccttggcctggaaagataaaagcaattttccccatttcttatctctccttttcttcattagcagtttgttcgattgctttttgaatagtggaagacacattgttttccaccatattcacagcttgcttaatcgcgctaaatactgcattcgcatccgacgaaccgtgcgctttgataacaggcgcatgcaatccaaacagccctgcgcctccatattcactgtaatccattttcgcttttaacccctgcagctgaggctttagcactgctgcagctaacttgctttttaacgtgctcattaattcttgtttaatcatagaaaacaaggaaagcgccgttccttcaatgctcttaagagtcatattccctgtaaaaccatctgttacaaccacatccgctacgccgtttagcaaatcacgggattccacgttgcctacaaaattaagatcagcattttttagtagctgaaaggcttgctttgttaaatcgtttccttttttatcctcagttccaatgttcagcagtcccactctaggagcttgaatgccgcgtactttttcggcatacacagaccccatcacagcgtactggagcaaatgttcaggcttggcatcaacgtttgcaccaacgtctagcattaaaaacccttttccatctagtgtcggaagcgtcggagcaagtgctggacgttcaatgcctttgatgcgacctacaataaaaagtcccgctgtcattaacgcccctgtatttcctgctgaaatacaagcgtcagcacgaccttcggctacttcatttgccattaataccatagatgcttgttttttgcggcgcacagctcgcactggctcatcagttgcatcaatggtttcttctgtatgaataatcgaaatacgatctgaatttgttaaatatttttttatttctgtttcgtttccaattaacgtaatatgtaattctttaaattgagcagtagctttttctacaccttcaataatggctttcggtgcatgatctccgcccattgcatcaatagctagtttcatgttgcgtctcatcctttttattatttatcctttgtagaacgatacattttaaaagtgccagagaacacttgctcttgccctacatagctgtttacctcaacggtggttcgcacttcactagttgacagaactttcgcttttgctatcactcgttcatgaagcttaacagggcgatgataacggatcgacgcatctgctgtgagcgctagttcattgttaataacagcgacagctaacgaattagcttgcgcaaaaaggtggtgaccacgagcgatttgattacgctgaaacacatgctctgttttcacatcaaaaatagatatcgctgattgatctagttcaatgtcgataacttctccaattacttcttcaatcggaagcgaacgcacttcctcgtctagttgttttgaagctacatgcttaatacgttctcgcagttcaggaatcgacaactctaggcggtctaatcgaattgtttgaacgctcactgaaaaacggtctgctagttcttcatccgtaataaatgggttttcttcaattgtcgtttttaatagatgctgtctttcttttttactgcgcttcattgtccaccatccgaacttttaatactaggtactaatagcagtatataatcattgccttctaattgcaacatttttcacatgctgtattctgtgcattgacgtcgtattaatggccaccagccgctaactctttcacactaagccgctttttatctttatagacgaaaagagattgagacataactagatcacttcaatctaaagatgaacaaatgggataaaggcgctcgtatagattgcttgttacaccgctgctgatttccgtgcaagacttcgctttccgcggccggcccgtgatcctccttgttccttacgcttctgcggggtctcatctattccgctttccccgcaggagtgccttgcccttcacttaacagttagaagcacctacatacccatcacatacatgaaatctacgttcatcatcacaatgaaaaaaatccgaacgattgatcgttcggattttccttcaactaaactactttgtttcagtctcttttactaatcaaatttttctccagtcaatacgcccgttgcttctaattgtattctcagcagtgcaaactgatcttctgtccaaaagctgtcggaatttacaagcttagcagcatcttctcgagctacttcaagcgcacggtaatcgtgcaccatatcggctactttaaactcaggcatcccgctttgttttctaccaaagaaatcaccaggcccacgaagctctaagtctctttctgataatacaaatccatcgtttgtttccgtcataatggtcattcgttcttttcccacttctgatttcggatctgcgagcagaatacaatacgactgtgcatctcctcgccctacgcgtcctcttagctgatgaagctgagataacccaaagcgctctgcatcataaatgaccatcacggttgcattcggaacgttcactcctacttctacaaccgttgttgatactaaaatctgcacgtcatttacgctaaactgtttcatcacttcttctttttcatcagctgacaaccttccgtgcatgagaccaacgcttgcttttccattaaaatagtgagcgagtgttgcatgcacatcaattgcattttgaacatccagcttgtccgattcttcaatcaacggacaaataacgtaagcttgtctgccgtcatgtatttctttttcaacgaaatgtaaaatacgttcaagcatatcatgttttacccagtatgtttcaattgccttacgtcctgctggcatttcatcgataatggacacatccatttctccaaataccgtaatagcaagggttcttggaataggagtcgccgtcataaacagtacatccggactctcacctttttcacgtaaaacccggcgctgcccaactccaaagcggtgctgttcatccgtaatgacgagccctaaactactatatataacttcgtcttgaattaaggcatgtgtacctactaatacatgaacatctccgtttttcactcgctgaagcagctctcttcttgcttttcctttaacagaccctgttagcaagcctacgctgatgcctaccttttcaagcatcgcagtcaatgactcagcatgctgttcagctaaaatttcagtcggtaccattaaagcaccttgatgccctgctaaaacagtggcgtataaagcaaccgctgctacgactgttttacctgaccctacatcaccttgcagcaagcgattcatgcgataaggcgatttcatatcgtgcgtaatttcgtttactacacgtttttgagcgtttgttaacggaaacggcagcaggttcgtgaagtttaccagctcagttgaatcaaatgcttgcttcattccaggcgtttcttctctttcgcgctttctaagcgcctgcatttttaattgaaaaagtagaaattcttcatagacaaatcgacgtcttgcttgttttaaatcttcatgatcacgaggtaagtgaatacttctaaccgcttcttcacgcgttactagtttgtatctagaacgaatagaggccgggagcatatcctgaatgctactgccataattcttcaacgcaagagagacgaacttccgcattcctttgaccgttaagctgcctttaaccgagtaaacaggctcaatcgtttgatttttaacaaacggagaaaattgaagctcctgcaagttaagcgtttgccggtgctgatcccatttccccgtaaccgtaacagtttgatcgatttctaactttgatttatagtatgggcgattaaaacaagtaaccgtaatcaaatagcggtttactagcagccgaaacgtaaggcgcgaacgcttttttccgtaatacgtaagcgaggggacgctgtgaacctttccttctacggtgaccttttcgtcgtgctttgcttcagccaaatcttttaactcataatcttcatagcggtatgggaaatgttctaacaagtcatgcacactatgaatatgcatatcctctaatgcttgtgctgtttcctctccaatacctttaatggttttaattgaaatagttgttagttcattcacttttatttaatgcaataccaaagatcttcgcttcaagctcgcgacctgttggtgttgccgctaagcctccttgtgcagtttctcgtaatgcaaccggcattgtttgaccaattttatacatagcatcaatgacttcatcacatggaatacgacttgtaatgcctgctaaggccatatctgctgcaatcattgcattcgccgctcccattgcgtttcgtttcacacatggaacttctactagccccgctactgggtcacatactaatcctagcatatttttgagagtaattgccattgcttcagctgcctgactcggtgtacctcctgccatttcaacaatcgctgccgctgccatacctgaagctgaaccaacttctgcttgacatccacctgctgctcctgaaatagacgcattattggctacaacaaacccaaaagcacctgatgtaaatagaaattcaatcatttctttacgagttgggtttagcttatgttgcactgcaaacagcgttcctggcactactccagcagatccagcagtaggtgttgcacagattgtccccattgccgcatttacttcgtttgtcgctacagctttgctgactgcatctaaaattaaatttccagataaagattttccactttgaatatagttttgaagcagcactgcatctccgcctgttaaacctgtaacagactgtaccccttttaaaccgcgttcaaccgcttcttccataaccgttaagttccggtccattttttccatgatttcttcacgagtaactcccgtgatatctatttcctgttgaatcataatctctgcaatttttacattttgactttctgctaattctactagttctgctacgtttcgaaacatatagtaacctccgctatcattctgtcttattttcactttagaatcatctataatcactcggctccagttattctctcaagccggtcctattcgctctatcctactcaaccattcttgttacttgaataatgtgaggcaatgtttttaactcttcaattacatcatcttcaatattcgtatccatttcaattgccatgagcgctacttctccgcgctctttgcgagatacttccatatgtccgatattaattgagtgtttcatcaaaatattcgtaacggtcgcaatggcaccaaatcggtcattatgcacaacgagaatagctggattcatgcctgataaatttaattcaaatccgttcagctccgtaatttgaatttttcctccaccaattgaaattccaacaacttcaatttcctttaatccgtcgctcattttgatgcgagcagtattcggatgatctgtgattgccgcttcctcaacaaatgtgacgtccattccttcttttttagctaagtccaaagattgcggaatacgctggtcgaacgtatcaaaatctaaaataccgccaatcagcgctacgtctgttccgtgccctttatacgtttgagcaaaagaaccgtacagtgaaaccacaacttttgtgggctgcttgccaaaaagcgttcgtgcaacgcgtccaatacgcgctgcaccagctgtatgtgagctagatggtccaatcattaccggaccaataatatcaaagacagatttatatttcataaggattttccccctgctatttagacattgttattacttatatgttacttgagcttttgactttttggaagctttgtttcacgctcttaaaaaatttaaaaattctcatttttattagggactcacgtacaaaaaaagcggtgtatttatccataaaaataagataagcacaccgctttttttactatattatgcaggaaaagatgaattacttaagctgcttcttgctcggaagctacatcgtctactgttttaattttaaagtttttaaaaacaactgaacctataaacccagctaatgctcccgctagtgcgcaaagtactgcacaaattgtgaccttcatagggtcattaaacccaaacatcactgcaagtcctgcgattggcgttgccgtgcctgcagcatcatttaccaatccgaacagagccacaaccacaccggctagtgcacctccaacaaagtttgtaatgtagataggaatcggatttgctgaaataatattcgcttgtgttaaaggttcaactgcaactgaaatggttgtacgacgatccccaatttttaatcgatcaaacagcacatagttcatgaaagaagaaccaaacacagcaagagctccaatcgccataggcaatcccgttaaccctagcatagccgttaaagccattgagctaagcggagccgttgctactactgtgataactccgcctaaaataattcccattaaaatagggctagcacttgttgtgtctttgataattcctccaatatttaaaagcgtcgcatctacaataggtgagaatgcattaccaattaatcttgttaaaggtgctgcaattaagatgttccctaataagtctagaccagcaggtgcctttttctcaataaatttcactacaaatgccatgaggtatcccgcaaaaaatccagggagcaagcctagccctgaacacaccacccccatcataagagcatatacaggagatacgcctaacgccaaagcaactaatgctgccgccgcaactcctcccattcctcctgcagcctttccaacttcacccaggaatgaaatacctagtaaatctcctcctacatatgactgaaaggcctctacgagaaacgcagctaccgctccgcttgccagcgcccccattgctttcatgccataaggtgccttgttgctaaacaaccaaaataaaaataaaactaataataataaacctgttccttttaaaatatccactgttgtctctcctctcatgctgttttcttacacatttgacttaatcagttttcaaaactaccatataaacgggttcttttcaactaatatacctaatataccgaacaattacaacaattaataataaaatagttcgtattccacttaaaaaaacacaaaaaaagaagcgcccctcgggagggatgcttcttttttggctattcaattgcaaaaatgtaagaatataaaggttgatctcctttatgaagctctacctcaacttcttcaaacgtttcttctacaaaagatgttagcgcttcagcttcatcgtctgagacatcctctccttgaagaattgtaaggatttccgcttcgtcatcaatcatataagtcaatagcttttttgctgcttctaatttctctgaatcttttacaacgattttcttttcggcaatacccataaaatcgcctttagctaattcaagaccatcaatatttgtatcgcgaactgcatacgttacttgtcctgttttcacgtgctgtagagcttcagtcattacttcctcgttttcttttaagctttgctgaggattaaatgatagcagcgctgtcattccttgaggaaccgttttagacgggacaaccgaaacgtgactgccgacaacagcagccgcttggttagcagccatcacaatatttccgttattaggtaaaatcagtacctgttcagcatttgtttcttcaatcgctttgacaatatcctccgtacttggattcattgtttgtccgccttcaataacaaccgttgccccaaggctcttgaacaattcagcaattccttttcccattgacacagtaacaatgccaaagggctgtttttcagcattttttactgcaggcttttcttcacctgaaacaatgctgctatgctgttctctcatgttttcaatcttcattttaattaaacttccatactgctgcccgtagtttaacacttctccaggatgctcagcgtgaatatgaactttcacgatttcatcatcagatactacaagcaatgagtcgccccatttgcttaagtcttgacgaaacgtttcttcagaaaatgttttagctgcaggcttatcctcttccagccttaccataaattctgtacaatagccaaattcaatatcttctgtattcatatagctttgtgcatgcttatgatgctcagcatttacgagttcattcatcgaaggagctgacatgggtacacccggaagtttttcaccttttaattcagctaaaaacccttcataaattaaaacaagcccttgacctccgctatccactacgcctacttcttttaacacgggtaaaagatctggcgtgcgatttaacgaagcattagcttccttaagtacttcttccatgaacagaatcatatcaggttgctttttagcaacagccgctgcttttttagcagtatccttagctactgttaaaatggttccttcgattggtttcataacagctttataagcagtttctaccccaagctcaagagcttcagcaaactcaactgttgtaatcgctgacttttgctcaaccgatttcgcaaaaccgcggaataattgagataaaataactcctgaattaccgcgcgcccccatcaataagcccttagacaaagcttgactcacttggccgatgtgatcagatagtttattttttacttctttagcaccagacgtaatcgataagttcatatttgttccagtatcaccatctggtacaggaaaaacgttcagcgcatctacataatctgcattgttagatagatgctgggctccttgaagcaccatttctctaaaccgctttccgtccaacgttgtcattgacacgaatcttcctccttaattaaacgttcgttacacgaacaccctgcacataaatatttactgaatcaaccgttaaaccaaccgtttgttccagtgtgtattttacttttgtttgcacattatgagcaatttcagaaatttttgttccatagcttacgataatgtacatgtcgatatgtacgtcatcctcttcttgtcttaccacaatacctcgtgtaaagttttctttgcgaagaatttctgtaagaccatctttaagctgattttttgaagccattcccacaatcccgtaacaatcaacagctgctcctccagcaattgttgcaattacatctgtagagatatcaatttgaccatacttcgttttcatttcgatggacatactcgttcccctttctactttcataggttataaatattctactataatcaatctcgttttaaaagaggcgtccagcttgtcccttttaaagatgacagtattaggtatcaacttgtcttaaaatgagtaatagcccaagttatacctatttctactctctatattattgaacatagattcattttatatgtcaaggaaaatttcttgaaagcttttctccagaactattgcattctctgtaaggctgtgataaattaatatagtatttctcaaaacagaattgagtagtttttttggtgttaggagggaaaatcatggcacgcaaatgtgtagtaactggtagaaaagctcgttcaggtaacgcacgttctcacgcaatgaacgctactaagcgtaaatggggtgctaacgttcaaaaagtacgtatcttagtgaacggtaaaccaaaacgtgtgtacgtttcagctagagcccttaagtctggtaaagttcaacgcgtttaatctttataatgaaaaagcaccatattttatggtgcttcttttattattccagcgttgttaatcttttttgaacgaattaagcatgacctttacgatgccacctaaaaactttggaagtttgattgtatagaatttcatactgtccctcctaaccgtctccacactttatctccttttaaagaaagccctatgtcctgctctcattttccatacttcatcacaagcaacgtttatcattgcttcttaccatcattaatatgccttttgtaaatgaaaaagtacctctttgttgaataagttcattgctaatacataaagttgagccgagttctacttcatgcttattgagcggatatttgaaaccttctagcgtaagctcttttacaccgcctgcaaaaggaacgaatgaaatatagtgaaactcctttaaacgatcaacatgataagtgcctggttcaaacaattgaatgatattttgattgtcaatcatttgtacattcgctttctcttttaaccctttgtacaggagctgaatgcttccaaacatgtggtcaagccttccacctgttgctccaaagatacaaatactttccggtttttgccctattgcccactcaaaagcaagttccaaatccgttgcatctttttctgcaggatacaattcaacatcttgtaatgcttctctcactagcttaagctgtgcatttgtaatggaatcaaaatctccaaatgcttttacgggcaaaatgtcttgctgaagaagaaggaatacgccgcggtctactcctacccactttacatcgtttgactggtgcaggggcggcatatgttcatccggtccccctgctagaatatgaattttcattatgtatatgctccttttctattaaaaaatgaacgaaataaatatgttttctttatcctaaaagaaaaagctgctgtgtacaagttctactcgttgtacacagcagcttttattacttacgcttgaacagttgtgcgaatttgactaattgcgccagctcggtcttcttggttataaatagctgagccagccactaagacatttgctcctgcttccacacattttcttgctgtttcttcattaattcctccatcaacctctacttcaatagaaaggtgacgaatttcaataagctgagagatttgctcaattttcggcagtacatttggaatgaagttttgccctccaaagcctgggttcaccgtcattaataaaataagatcgatatcttctaagatatgctttaccacgtcaattggcgttgcaggatttaaagcaacgcctgctttcatgccgtgttctttgattaattgaatggtgcggtgcaaatgagtacacgcttcagcatgtaccgttaaaatatcagcacctgcctttgcaaacattggaacgtattgatctgggttttcaatcattaaatgcacatctaatggcagtgttgtgacagggcgtacagcctcaacgataagcggtccaattgtaatattaggaacaaaatggccatccataacgtcgatatggatgtagtctgctccacctgcttcaacttcacgaatttcttcagcaagctttgaaaaattggcagataaaatggaaggtgcgatttttgtcatttttaatacctcggctttctttgcttaatttcctcaataaattgcaagtaatgttcgtagcgataactcggaatttctttttgttcgtatgcttctttcaccgcacatttcggttctttcacatgcaaacaacctcgaaatttacactgttcactcaaacgcgacatttcaggaaaacaatgggttaactcttctacttctaacgttaaaaattccagtgagctaaagcctggcgtatcggctactaaaccttcaccaaacgaaatcagttctacatgacgtgttgtatgctttcctcttccaagtgacattgaaatatcatttgtctttaactcaagctctggtttaagtgtatttaacaatgaagatttacctacacctgactgtccggcaataaccgttacgcgatcttcaaataacggctgaatttgttccatgcctttttctgtgactgtcgacgttaaaatgacctcatatcctattttacgatattcttcggcatattgctcgatttcttgcttttgctgctgtgataaaagatctacttttgaaatacaaataataggttcaatatgattagactccactaacactaaaaatcggtcaagaagcatcgtgctaaaatcaggttcaatcgctgaaaaaacaagcagcgcctgatcaacatttgaaattgggggacgaactaattcatttttacgttctttaatttcaagtatatatccttcaagcttattttctgcctgaaatactacattgtcaccgactaaaggcgttactttctttttacgaaaaacacctcgtcctcgacattgcgttacttgtccgtcatgaagaacataataaaatccgctaagggatttaataattcttccttctggcataacctcactcctatcactctggatattcaacgtctttttcttcaataacttccccgtctcggacaattttataagacgctttttcattttcatcaactaaaacatcgaacgattcttttgttgtttcagtaatcgttagttccttagcaggaacggacatatcgttatctgcatcttcgatataaatttgtactttttgcggctttggcttttcctcttctgttccggtggcatcgcctgtttccgttgcgtcgccttgttccgtgcttgcttcggtgtcagtctcttctttatacggaatagtcacatccactgataccgtttgaggagcttttggctccttgcccattgagaccgtaatggtgagcttatcaccttgctcgatactctgctccgctgcaggcttttgagacatcacaagacctttttcaacagtgtcggaatacgctgtttttacatccacttcaatatcttcatctgatgcataatcttttacgcttttttccgtccagcccgagaaatcctttaatgtaatcttcggcggccccttacttacccatagcgtaaccgttgtatcctccggcacgacttgttcggtttctttaggcgtctgatctgtaatattgccttttggttctgtgctttcaacttcgatggattggatatctttataattctgcttttctaacagactttttacttccgtaaagcttcttccgatgtaccggttaaatgcttcttttttctttcctgtacttcgataaataatgacattagatccttctttgataacgtctcccgcttctggcatcgttttaaccacgtcgccttcttccacctcattatcggatatatctttaggattcttcactttaaagcccaaagaaactaaatcggttactgctgattcataatcttgattatgtaaatcaggaacctttacgtcttttggcagtaataaagccggaataaatgtaacggcggctacgctagcagctgccagcagcaaaaaaattaaaacaagcgttacaatcagcttgcttttgccttttttctttttcttcttttttttcttcggctttaactcttcttcctcttgttcttcgcgctctaagtgaggaggttttctcacaggtacgtgcgtttcttcggattcaacaaaatcctccttaataactggaatggcttttgtcacttcttcatcatcaggcaccgtaaacctttgttcattataacgatttggatgaacagcagactgtaaatccgcttcgagttcttcgacggaactgtatcggtaaaatggatctttagttgttgcttttaatacaacattctccacgctttgagggatagatggattccatctttttggagaaggtgtttctgtctgtaaatgttttaatgcaattgacacagccgattccccagaaaaagggactcgacccgttagcaattcaaataggacgatgccaagcgaatagatatcagaacgcttattcgcaagccctccccgtgcctgttcaggagataaataatgaacagagcccaaaacagaattagtatgcgtaatggttgtagaacttagtgctacggcaatgccgaagtcagtaactttaatggtatcatcatgatcaattaaaatattttgaggcttaatatcccgatgaataattccgtactgatgagcatgggcaatagctgatgtaatctgcgtcataatatgtatggctttatcaagagatagtggtgattcttgcagaatgtattgctttaatgtcatacccggtacatattccatgatgatataataaatatcttcttcttctccaacatcataaatactgacaatattaggatgagcaatactcgtagcagattgtgcttctcgatggaaacgctttataaacgcatcgtcacttgcaaagtctaaacgaagcactttaattgccacatcacgatccaaaatcatgtcgcgacctaaatagacgtttgccattccgcctccaccaattacttgcaataccttataacggtcgtttagccgtctacctattagcaacactctcacccactttcagatgtaaagtccacaattgcaagtgtaatattgtcttctccaccaagctcatttgctaattgaatcaggctcgtacccttttcgtgaagtgatgaacttgttgataacgtttcgttcagcttttgttccgttaccttatttgtcagtccatctgaacataataataatcgatcttctttttccacttcaattgtttttacatctaaactaacattttcttcggtacctagtgctcgcaataagatattttttcgtggatgatgctcggcatcttcttttgtgatttgaccattttttacgagttcattcacaagggaatgatcttctgttacttgttgaaatccatattcattggaaatatagcatctgctgtctcctatattaccaatcgcacaaaacgtatcggcgcataaagcaagtacaactgttgtacccatccctttacactcttcatgctcctgagcatactgataaatatcttgattaatttgcgaaacatgcgtacgaatccactgcgtcgcctcatcaggagacgttactttgtccgcttctgcccacgctatttgcaatttttgaaccgccatctcactggcgacgtcgccagctcgatgacctcccataccatcagccacaattgcaagcagctgattgtgttggttcaaaaatacccctccgttatcttcattgtgttgtctaactctccctcggtctgtcatgaagacagttgccatacaatcacctcgtctcttctttacgctccttcgcacgtaattggccacaagctgcatcgatatcatgaccttgctcacgtcgaatagtcacgttaacgccacgctttttaagcgtacgttcaaatgcaaaaatctgttcacgtggtgtacgaacataatcacgctcaggcacatagtttaccggaatcaagttcacgtggcatttcacgtctttaatcaaatccgctaattcctcggcatgctctacttgatcgtttactcctccgaatagaccatactcaaagctaatacgtcttcccgttttatccgtataatatttaatggcttccatcaaatcaggaagtttgtacgcacggttaatgggcattaagcgtgagcggatgtcattgtttggagcgtgaagtgaaatcgcaaaattgatttgcattttttcatcagcaaacttatagattttcggaatgattccacttgtcgatactgtgatatgacgtgcaccaatatttaatccatcatcactgttaattgtttttaagaagcgcatcatttcatcatagttatcaaatggctccccaatacccataattacgacagagctcacgcgttctccttgttcatctagcgctttttgtacttttactacttgcgctacgatttctccagcttctaagttacgctttaaaccgccaagagtagacgcacagaacgtacagccaatgcgacatccaacttgagtcgttacgcagacagaatttccgtattcatgacgcataagcactgtttcaatcgtataaccgtcatggagttcgaataaaaacttcatcgtgccgtccccagacgtttgctgaacgactgtttttaatgtcgttaatgcaaatttgtcttttaattgttcacgtaaccctttagataagtttgacatatcgtcaaagtccgttacgcgtttaacatataaccagtcaaaaatttgtttagcacggaacttcttatctccgtgttctactaaccaattttctaggtcgttcatttctaatgaataaatagatggtttttgcgctttttcttctgcttttgcttttcttttagctacttcttccatttttacaccttcttctgtaaacatgcaatataaaacccatcgctttgtgcatctggcagcaattgaatttcaccatgttttacgttttgtttaagcttttgcggcatgcgtgcagcgagtgtttcatctttttgaaaatcagcatgatctgctaaaaatgctgctacaacatccccattttcatcccggtcaattgtacatgtactatatacaagggtcccacctttttttaataaaggcgcaaccgcatttaaaatatcttgttgaatacgcgccagctgctttacatcttgctcagtttttgtatatttcaaatcaggtttacgtctcattacaccaaaacctgagcacggagcatctactaagatgcggtcaaacatttctttatcaaactgttcgcctgctttgcggctgtcttgaaccgtcggctcaatattggtaaggtgcagacgctctgcctgttgggcaatcagctttactttatggtcatgaatgtccaaggaaataactttaccactgtttctaagctgctctgcaatatgagttgattttcctcccggtgcagcacagctatctaaaattagctcttctgcctctgcaccgagcgcatgagccactaacatagagctttcatcttgaacggtaaacattccttcacgaaatgcttgtgtatgagctgcatttcctttttgaacttctagcgcttcttctacaaaatggcctggttctacaacaataccttctttttctagcgcttcttttacttcattttgcgtaaagcgtgcactgtttactcggattgtttgtttaggggccattaaattagctaaacagattccgcgtgttttgtccaatccatattgttccacccagcgttttacaagccacaatggatgactcgtttcaatcgccaagcgctccacaggattttgtatttcttctaaagaaggcgtgccgctgcgctggatatttcgtaaaacgccgtttaccattgaggcaattcctttgtgaccgcgttttttggcaatttctactgcttcatggaggattgcccggtcaggcactcggtctaaatataccatttggtaaagtgataaacgaagcagcactcgcacccaaggctgaagcttttttggatttttcaagaaaggcgctaacccgtaatctaacgtatcacgtctttgaatcgttccatacacaatttccgttaacaaccctgcatcttttccttgaataccccgtttttgtatgctgttatttaacaatagattgctgaatgcctgatttttttcaatagctagtaaaatatctaaagctatgtctcgaacgttgtacttactcattgacatcccctaatactgttccgacttccacggatgtacctcgtaaatactgcgctgcatccatacgtttttttccagccggctgaagttccgtcactttaatagctgtttcatttccagttgctactataaatccgtcctcttcaagtgataaaacggtacccggtttgcctgatgcggatactttttctccccaccaaattttcatgacctgaccgtctgctgttgtataagcaacgggccaaggatgaagtccgcggatatggttataaatttcttctcctctacgggcccaatcaattttctcttgttcacgcttaatgttagaagcaaatgtcgcttcgtcatcgttttgtttaaccggcgtaatttcaccttttaaaagagaaggaatggtttctgaaagcaattttgcaccagcagcgctgagtttatcatgaagtgtgccaacgtgatcacgttcttcaatcggaacttctacttgtgttaagatatcacctgcatctaatttttctaccatatacataattgtaacaccagttttcggcttaccttgtagaattgaataatgaatcggcgcgcctccgcgcagttcaggtaacagagaagcatgcacgttaatacagccgtatttaggcgcttctaaaataggggttggtaaaatttgaccaaaagccgctgttacaattaggtcaggctcatacgctaacacttgctgatattcttcttctaaacgaatcttttctggctgcagtacaggtatttcatgctttaacgcctcaacttttacaggaggaggtgttaatacgcgcttgcgtccttttggtcggtccggctgtgtaaccactgcgaccacttcatatccatctttaagtaatgtttgtaaaaccggcactgaaaaatccggcgttcccataaatacgactttcatcgtgtaaaacctacccttctagttcatcctcttcgtaatactttgttactttttccgtgaacaatacaccgtgtaaatgatcaatttcatgttgaattgctcgtgctaaaaaaccttttgcctctataaaataaggttttcctttacgattttgcgcacgtactttcacataatcagctcgagccacgtcaccaaaaaggcccggaaaacttaggcagccttctggaccgatttgttcgcctcgttgctcaataattaccggattaattagttcaattttaccgtgtcggtcatccacgtctaccactgccacttgctgcagaactcctacttgaggagcagctagacccacaccgtctgcttcaagcattaaatcatacatgccgtttagtaatttcgctaatttattatcaaagtttttaacgacttcacattcttgttcaagtacttcattaggatggtaaacaagcttaagcttagccaaataggcacctcctttatcctttctatttatatccaaaaatcttcttctttaacgccatcaagacgactagttacatcatcgagtatggattcaaatcaatagtgatcgttaaattctccttctgcatttccgcttgataacgttctaatatatatttcaacagcggaatcaggcttggttccagcttgtattttaacatgcattgatagcgatatctatcttttatcttagcaatcggagatgcgactggccctaagatcgttgtttgcggcgaaagtttctgacgcagatactgcgaaattttgtctgtaacagacaccacttttgcaatattttcatgagataccgttacaagcgccaagtaaaagaaaggggggtatttgtgcattttacgaatttccatctcgtgcttataaaacgcatcgtaatcatgctgactcgcaagttgaatgctgtagtgttccggcgtgtacgtttgaatcactacttctcctggaagtttgtggcgtcctgctcttccgcttacttgtgttaaaagctgaaacgttttttcagatgcacgaaagtcaggtaaattcagcatcgtatctgctgttaaaacgcctacaagcgtgacgtttggaaagtccagtcctttcgcaatcatctgcgtccctagtaaaatttgcgcttctccacttgcaaacttgttcaggagcttttcatgggcgccttttcggcttgtcgtatcaacatccattcgaacaactctagcctcgggcagcacttttgttaattcttcttccactttttgtgtaccagacccgaaaaagcggatatgttcgctgtggcattctgggcactcagtgtgcacatgttcttcgtgtccgcaataatggcattttaatttattttgatagcggtgatacgttagtgaaatttcacagtgctcacatgtcggaacgtaaccgcagtctctgcacataacaaaagaagaatgacctcttttatttaaaaataaaacgatttgctcccctttttccaaacggtctttcatcttttcaaacagcatagttgaaaacatagagcggttgccgctgcgaagctcttctctcatatcaacgatatccaccgaaggcattgatgacttattcattctttgctttaacgtcagtagcttatacacacctttttgcgctcttgcaaaggactcaagcgttggtgttgcacttcctaaaatgactggacactgatgatgctgccctcggtaaatagctacatctcttgcatgataacgggggttttcttcttgtttataactcgtctcatgttcttcatcgataataagaaggcccaaattttcaaatggagcaaatacagcagagcgggcccctactacaacggatacttcttttcgctgaatttttcgccattcatcgtatttttccccagtagacaagccgctatgaagtacagcaacttttgagccgaatcgctctttaaaacgcttgaccatctgaggggtaagtgaaatctccggaacaagcataatcgcttctttccctttttttagcacttgatcaattgattggagatacacttctgtttttccgcttccggttactccgtacattaaaaacacatcgtgaagattttcttcgatgtcctgcagaatcggtgcgattgcctcagcttgttcatcggtcaattgaaatggctttgatggtgtaaagtatcgatcttgataaggatcacggtatatttcaatttccgtttccgctaagagtcctttgttaatcagcgcttttataggagcggaggtaatctgcaaatcttccgctatttcttttatagctacttcttcatttcgattcaacataaaagacagcacttgtttttgcttttctgcctgcttatttaactcgctcataaactgctgaatttcttcaaggctttgattcagttttacgccttttgccgtttttttgtttcctttgtttttcacgacgtagacgacttcaattagacctttttgaatatcacggtgaaaagcaggagcagcggctgttttttctacttcactccacttcagcgaggatcttgactgaaaaaacggctttacttgctcatgaagctgttcgtatgcctcttttgaaaggagtgacagttctttatcatattttgctttcatcgccgcaggcagcatgacttgaaaagccgatatcataaaacaaagcgttttttcggttagccagtgcccaatctctaacagttcgggagtcagaaccggcgttaaatcaagcaagtcagcgattggtttaacacgcttaacttcagcctcttctttaagagccaccacaaacccttgaacttttctaggaccaaacggaacgacaactcgcatacccggaacaataattcctttccatttgtcgggaatagcgtagtcaaaagctcgatctgtttgcttagcagctacgtccacaattacactagctacgctcattttttcagcccttctaacatttccttcacttcttttaacacctcggtagctacatcgtgttttgaaagaatgggaagttctttagactctccgcttcgcttatagagcgttacaatatttgtatccgtcccaaaacctgctccttctgtcgtcacgttattggctacaatcatatccaagtttttagatgcaagtttcttttgtgcatattcatccacttgttctgtttctgctgcaaagccgactaaaagctggtgttcttttcgctctccaagcgtgcgtaaaatatctgttgttctctctagctctagtactgcttcaccaggctgctttttcatcttttgatcaaacacatgctttggtcgataatctgccactgcggctgatttaatgacaacatctgcttcatgatagcgctgcataacagcttcaagcatctgctgcgcactttcaatttgaacaacctgcactccttttggatactctaaattcgtcggtcccgttacaagcgttaccgatgcgcctaatttagcagcttgttctgcaagggcatagcccattttcccagtagagcgattggtgaaaaatcggacggggtcaatgcgttctaccgtaggtcctgctgtaaccaatacattaacaccttcaaggatcttttgtgtatgtgatgcttgtgaaaaataagatccgattagtgaaacaattgtttctggctcttcaagacgaccttttcctacataaccgcatgccaaatacccttctccaggttctacaaaagagtaaccaaatgatgaaagagtgctcatattttttttaacagctggatgatcgtacatatgaacattcattgcaggtgcaatccatacaggtgcagtagcagccagcagcgttgtggaaatcatatcatctgcaagaccatttgctattttccctatcatatttgccgtagcaggagctactaaaattaaatcaggccaatctgctaaatcaatatgtgcaattacagatggatctttttcatcaaacgtatctgtataaactgggtttcgagacagagcttgaaacgtaagcggcgttacgaactcgcatgctgaagcagtcatcattactttaacttccgcacccgcttgtactaatttacttgttaaagctgcggctttatatacggcgattccgccgctaacacataataaaattcgttttcccttcatcattatgcccccatctatttatcccgctcaaccagcatccgcttgtttaatcgggtaactatctaaagcttttcaattcaattattataccatttttgtagtgagacattcactatcctgcttgaacacagataaaagcatcaaaaaaataacaacctatgaagtaggttgttattttttcacttactgatgtttagaatcttcttctgctacaccttgcttatagcttaattgttcagcattaatttcttctagagcacagcctacaaacttataagaaaccggcttttcaatcggcgtatcattgtgaagctgtaattgacgtgcacgttttgcagctactgtcacaagcgtgtacttagaatctaatttttccattagagaatcaattgatggataaagcatgtttattctacctccagcattcttttatagcgcgcagaaatacgatcacgacggcagtgttcagccgttacgatagcacggatgcgagcacaagcattttctactttgtcattttctacaacataatcgtaggcgtccataagttcaatttcttcttttgccacgcgcatacggttattgattaaatcttctgtttcagtaccgcggtttacgatacgacttttaagctctgataaactcggcggtgccaagaagatgaacaaaccttctggaaatgcttctttcacttgaagagcaccttgcacttcaatttctagaaatacgtcttttccttcagataacgtttgttctacataatcaaccggggtaccgtagtagttacctacgtattcagcccactctaataacttcttgttttcaatcatgcgctcaaactcttcgcgtggtttgaagaaatagtcaacgccgtctacttcaccttcgcggggctttcttgttgttgcagagatagaatactgcaatttaatgtcttcttgctcaaacaatgcttttcgtaccgttccttttccaacacctgatggtccggaaagaacaattaataaacctctttcaatcatcggttcaagtgacctacccttctaataattcttctttgtttataagtcgctgtgacacagtttctggctgtacaggagctaaaataacatgatcgctatccataacaataacagatcgtgttttacgtccttgcgttgcatctattaaagagcctcgatcttttgcatcttgaataatgcgtttgattggagctgattcaggatgaacgacagagattatacgattagaagaaataaaatttccaaatccaacgttcactaatttaccgctcataagaagcctcctgctataccaatataatctttatcttacacgaaggctattcaatattttgaacctgctcttttatgcgttctaattgtgctttcatactaataacatactgagcaatagtaccattgtttgccttcgcaccaattgtattcatttcacgattcagctcttgaacaagaaaatccagcttgcgtcctactgaatcaggtgtatttaatgcttgaataaattgtgaaacatgactttgaattcgcgtaagttcttcgctaatatctgctttttcagcaaaaatagctacttcagtcagcactcgctgctcatcgaaagtaccttctaaatagtcgctcagctttcttttaatacgctcgcgatattgttcagcaacttcaggagcaagctgtgtaattttttcgcgaatgtcttgaatgtcctgtaagtaccccattaaatcgtgatacagctctgatccctctcgtttccgcatatccactaactgatgcacagcagcttcaacagcttcaaagattgcaccatgaatactcgtctgatcagcttcttcttcataagttgtcatcacttcaggcatgtgtaaaatgtcttgaatttgaacagattgtgacagtccatgcttttcttttacttgctgcaacgcatgcatgtattcatcaagcagctgccaatccgtctgcagtttcttttttgccatttcttcacctgaaatagtaacaaatacttctactctaccacgttttatgtatgtttgaacgattttttttattttatcttcaatttcaattaattgtcttggcatacgaataacaatttcacaaaaacgatgattaacagacttcatttcgactgttactgatcgattttccacttccgcttttccgcggccaaaaccagtcatactttttatcattatcatcacatccactatgtacatcttacataaaaagtatcataaaagaaagtgttagcaaaaaaaagaaatctctcttctttattcaacctgtaaaggctgccttcatgagttttctcatttgggacagcctgtattaaagtatagcacaatttatgaaggttttcttgttaaaagtgaaccggcaagtaaaaaagttggaagacttgcaagtcctaaaataacgagccattcccgcggtgcaatggccattgtatggaaaataggctgcaggggcggatagtagatagccaccagcataaggataatagatgaaataacggctcctacaagatataggttctgaaatggattgcgatcaaagattgatttttcacttcggcagtcaaatacgtgaataagctgtgccataacaagcgtggcaaatgcaatcgtctgagcatactgcagacgatctgggtcattgtcgtagacaatcatgaatgcagcaagtgtagcagctccaattaaaaatccgcggctgactactttccaccctaatcctcttgcaaaaataccttcgcgcggatgccttggatgacgcttcatcacgttgtcctccggctggtctaagccaagagccatcgcaggcaaaccgtctgttactaagtttacccatagtatttgaattggcactagcggaagcggaagtgctaaaatcattgcaaagagcataactaaaatttctcctacatttgatgcaagcaagtaacggataaactttcgaatattttcatagatgtttcgtccttccttgatcgctgatttaatagtagcaaaattatcatcaagcaaaacgagcgaagacgcttcttttgctacgtctgtcccggtgatgcccatcgcgatgcctatgtctgctgctttaatagccggtgcatcatttacgccgtcgcccgtcatagctacaatgtgatcttttgcttgaagagctttaacaattttaagtttatgttcaggcgataccctggcatatacgtaaacatcatccactacttcttctagctcttcctgcgtcattttggataaatccgttccttccaagacttgaccgtttttcggtagaatgcctagctgttttgcaatcgcctgtgctgtaataacgtggtcacctgtaatcataacggttttgattcctgcgtctcggcattctttgaccgcttgcttgacttctggtcttggcggatcaatcattccttgaagcccgaggaaagtaaggtctttttccgcttcgttctctgtatgaacgctctcatggtctcctaacggccgataagcaatcgcaatggttcgaagcgcttggctagctaactgatcaatcgctccttttacttcattatgaaccgttaccgacagcgtttgttgtctgctttcccacaaaatatttttgctgtttacaagcagcacatcaggagcaccttttgttatgacatagcgcttattagatgcgtcttcaatgactacactcatcattttacgcgttgaatcaaatggaaactcttcaataatcgtaaactgcttttgaatgttttcttttgtcagccccgctttcatcgcggccacaagcaaagccgcttcagtaggatccccgtcgatgacatattctttatcttttctcgaaatagacgtttgattgcaaagcagaccaaacaccaaaagctgctgaagcggtttttcactccgtgtatcaacttctctttcctctcgcgaaaatacgcccgtaggttcataccctgtccctgataccctccacgtcattcctcctgaccagaggtgagtaaccgtcattttattttgcgttaatgtgcccgttttgtctgagcaaatgactgatgcgcatcctagtgtttcaacagcaggaagtttgcgaacaatggatctttgcttaatcatgcgctgtacaccaagagatagcgctacggttacgatggcaggaagaccttcgggtatggcagcaacagctaaggaaactcccgctaagaacatactgtataaatcatgaccttgcagcacaccaatcccgacaactaatacagtaagtgcaagagctacaacgattaaaattttacctaattgctctaacttccgttgaagaggagtaatcatggcttcagcattttgaagcaaatcagcaatttgtcccatcgctgttttcattccaatccctacaacgatacctgttccgcttcctcgcgtcacaagcgtacccataaacgccatattgtcctgatctccaagcggcacttcatctcctggcaaagcttttatttgcttggcaacaggcaaagactctcccgtaagcgctgattcttcaatttctagacttttagcttccataattcgaaggtcagccccgatacggtctccgctcgaaaactttacaacgtctcctactaccagctctttagatggtaacttaacccatttcccttcacgcatagctgctacttgaggagcagaaagctcttttaatgcatgaagagatttctcggcttttctttcttgaaaaaaacctagaaatccattaattactacaatggcaataatagcaaccgcatcgatgtattcgcctaaaagccctgaaataagcgtggcagctagtaaaaccagtaccataaaatctttaaactgctctagaaacacaagaatggccggttttttctcaccttcagtcaattcattaaatccttgctgctgctgacgtgcttttacttctttgtgtgtaagaccatgctgcctatctgtttttgttacttctactattgctttttcacctaattcataccatttcattgcatcttttcacacccttttatttgtaaatgcacctattagattgttacaatcttatatcgtatgcttattcagactcgtcctaaaaaatgctatacttttctataggacaattttcaattacttaaggatgtgagcactatgtcatttgatggtatttttacatatggcattttacaagaattatctgagaccttggtttcaggacgaatttcaaaaatatatcagccgtttccaaacgagttgattttacaagtacgcgctaaaggtgaaaaccgcaaacttttaatctcagctcaccctaactattcacgcgttcattttacaaatgagccctatgaaaatccatctgagcctcctatgttttgtatgctgcttcgcaaacatttagaaggaagcattattgaacacgtgtatcagcttggattggaccgcattttagtcattgaaacaaaaggacgaaatgaaattggcgacgtgacgtacaagcagcttattattgaaatcatgggaagacatagtaatgttgtgcttgtagataaagaaaaacaaacgattatcgacagcattaaacacgttccaatggccttgaacaggcaccgtacgcttctacccggagcaccttacgtactgcctcctagtcaagataagcttcatccatttgaagccgatgaagaaaccgtggttaaaaaaattgattttaatagcggaaagttagccacccagctagtgcaaaccttctcggggctttctcctttaattgcaaatgaagtggtgtttcgctctggcttagcgaatcgttctacccttccaaaatcattcgtcgaaacgatgactctgatcaaagaaggtcagtttacaccgactctgacaaccgttaatcaaaaagactacttttatttactggaattaacgcatttagagggtacgaaaaaaacgtatgcaaccatcagcgagcttcttgaccgctattactacgggaaagcagagcgagatcgtgtaaagcagcaagcgcatgatttagtacagtttatttctaccgagaaaaagaaaaatgagaaaaaaataaaaaaacttgagcaaacgctgcaaaatgcagaaaaagcatctgattatcagctagccggtgaactccttaccgcaaatttacaccttgtcaaaaaaggagatgcgaaagtggatgttattaattattatgatgaaaatagcggtacacttacgatttcattagatccgcaaaaatcaccgtctcaaaatgctcaaagctatttcacaaagtatcaaaaagcgaaaaattccgtttcgattgtaatcgaacaaattgaaaaagcaaacgaagaagtacagtattttgaatcacttattcagcaaatggatactgctactcacaaagacattgcagaaattcgtgaagagcttgtggaagaaggatatttgcgcaaccgtcagcaaaaacaagcgaaaaaacaaaaaaacaccacgcctacacttgaacaatacgtttcaagcgacggcacgacgattttagttggaaaaaacaataagcaaaatgagtatttaacaaatcgccttgctgctagggatgacgtttggtttcatacgaaagatataccgggttctcacgttgttatccgcagccaagagccttcagaagaaacaattttagaagcggctcatcttgctgcttactttagtaaagctaaaaattcaagttcggtacccgtggactatacaaaaattcgccacgtaaaaaaaccaagcggtgccaagcctggttttgtgacgtacgataaccagcaaacggtgtacgtaacgcctagcgaagaacttgtactgaagctgcgtcagtcataataaaaccccccctttctatatagaaagggggggttttattatgacctagtttagttcatccatgaagggtctgaagggttttcacgccatttaaatagcttgtccatcgcttcttcttcaatgtatcccgcttcgtttgccgcttctactagcgtagagtagtctgttagcgaataaacttgaagttctttttctttaaacagctgacgcgctttttccagctcatatgtaaagatagacacaactcccagcacttcacacccctgcgcttttaatgcatcgactgcggtaaacacacttcctccagttgaaatcaaatcttcaatcacaactactttttgaccttttgttacttttccttcgatttgatttccttggccatgttcttttgctttgcttcgcacatagcacattggaagctctagcgcttcacttacccatgctgcatgagggataccagctgtagcggtaccagcaatcacttctgcattggcaaaatacgttttaattaaatgctgcagaccttttgcaatttcttttcgcacttttgggtagctaagcgttagacggttgtcacaataaataggcgacttaattccagaggcccacgtaaacggatcgttcggttgaaggcttactgcctcaatatcaattaattgttttgcaatttcttttcgtagttttgtcatcgcgtaatacgctcccctttccactgctgtaacatctcataatatgctttaagcgggtcttttgctttagtaatagaacgtccaacaacaatggcacttgagccatagtctctcgccagctgaggtgttgctacgcgaacttggtcatctactgaatctgtgcccatacgaatacccggcgttacggtcaaaaagtcctctcctgctgcttttcgaatcgaaggcacttcatgagtagaacatacaacgccgtctagtccgctttttttagcaagcgctgcataatgcgtaaccacttcttgcatcgagtgcgtaatgagctgctgctcttttagcatttcatccgatgtactcgttagctgagtaaccgcaatacaatccggacgctttttgccagcagcggttcctaagtcaagtccttcaatggctgcttgcatcatattcgttccgccggctgcgtgaacgttaaccaaatccacttcaagagaagccaaagacttcattccttgctttaccgtatttggaatatcatgaagctttaagtctaagaaaatctggtggttttgctcttttaatgcagaaataatggatagcccttctttataaaacagttccatgcctactttcacaaataatgattcttgttgaaaaggcattaaaaactgctgtacatcgttaattgatgaaaaatcaagagcaatgattaacggttgcttcacgctttttccagctccttccgatacattctgaaacatgctcgtatcctaatgatgttaatagccttggcagttcgtcaatgatggttggacatacatacgggtcaacaaagtttgctgtaccaaccgccactgcacttgcacctgcatataggaactcgagtgcatcttcagcagtcgtcactccgcccataccgataattggaatgttcactttttgactcacttcatataccattcgaatcgctaccggtttaatggatgggcctgacagtccgcctgtgccgttcgctaaaaccggctgagctgttttcaaatccagacgcatcccgagaagcgtattgatcatcgttaagccatccgcgccggcttcttcaacagccatcgccatgtctacaatatttgatacgtttggtgatagtttaacataaactggaacatttgaaacatcttttactgcttttgttaaacgagcagcaatgacaggatctacgccaaacgcaattccgccttcttttacgttaggacatgaaatattcaattcaagtgcttttacatttgatacggttgaaatttcttttgccacgtgcacatattcttcaattgaagcaccggctacgttcgcgataatcggcacatcatattgctgaagccaaacgagctcttcgttcattactttttctaacccaggattttgtaatccaatcgcatttaacattcctgcagatgtttctgctacgcgaggagttggattgccaaaacgagtgtccgcagtagtcgctttaatcataatggctccaagtgcatcaagtgaataaaattgagcatactcacgcccaaatccaaaacagccggatgcgggcataattggatttttcaaatctaatcctggcaatgtcgtttttagcatactcatagaagcacctcccctgcttgaaagacgggaccgtcgctgcagatttttttatacgccgtagaatcttcactttctctgcatacacatgcaaaacaagcaccgattccacaacccattctttcttctaaagaaatgtaaagcggcttgtttgtataattattttctagtgcttttaacatcggagttggaccgcatgaaaacataacgtcatatgaaaactgctgctcgtcaatcaccgttgtgacaaaaccttttgttccgtaagagccgtctaccgttgcaatatatgtttctcctaaagctaaaaactctcgctcgtaaaatacgtctgcttttgattgaaagcctaagacgtgaataacctgcacgcctttttcacgaagtctttttgaaagctcatagagcggaggcactccaatgcctccccctactaataaagccgtttgacctgactctatcgcttccaatggaaaaccgtggccaagcggacctaacacgtcaatcgactgtccggcttgtttttcggcaagcagcgatgttcccgccccttctgcacggtaaatcatcgtaaattgctcatgcgtttggtcaatttctgcaatactgattggtctgcgaagcagtggcaaatagtcgttgttgacgcggatatgcacaaactgccccggctcattcatgaaacgaacaagctcgccttgaagggttaattcatatacattgtgtgttaacggtcgctgactgacgacttgcatcatttcatgtttgatcatacggttgtcacctctttagttggacgaacttttttcattggtgttgtatggaagctgatcgtttcaagcactcgtaaaatcgcttctgctgtatcaagtgatgttaagcaaggtacaccattttcaactgcttcacggcgaattttaaacccgtcacgcgcaggctgttttccttttgttagcgtgttgatgacaagctgcgcttcaccttttcgtatcacatctaaaagattgtgatcttcatgatgaattttatttactacttttacgcgaatgtcttcttttgtaaacgttgaagctgttccttccgttgcaatcacctggtagccgatgttagcaaaacgcttcgcaagcgctgttgcctcttctttgtctttatccgctactgtcataagtactgaaccgtacggcttaatggacatacctgacgcaattagtcctttatataatgctttttcgtacgttgaatcttgccccattacttctccagtagatttcatttcaggtccaagcgtaatatctacgcgacgcagctttgcaaatgagaagaccggcacttttacgtagacaccttcttcttcagggtgcatgcctgattcataaccaagctctcgcaaacttgttcctaaaataacttttgttgcgacattcgccatcggaatacgcgtaattttacttaagaacggcaccgtacggcttgaacgaggatttacttcaagaacaaacacttctccttttgataagacgaactgaatgttgagcagtccaataatgtttaagccttttgcaatacgtgttgtgtaatcaatgattgtatcttttacatcctgtgacagagtttgcggtggatatacagcaatggagtcacctgagtgtacacccgcgcgctctacatgttccataatccctggaataaccactgtttcaccgtctgaaatggcatcgacttcaatttcttttccagttaagtagcggtcgattaacacagggtgatcagcgtgtacttttaccgcgtgttccatatagtgaagcagttcttcttctttatacacaatttccattgcgcgtccgcctagtacatatgaaggtcgtacaagcaccggataaccaatttcttttgccacaaccactgcttcttctacggatgcaactgtctttccaagaggctgaggtacttctaaacgcgctagcgtcgcttcgaattttttacggtcttccgctgcatctaagctttcaagcgacgttcctaaaatcttgacccctcttgcttctagctcgtctgctaagttgattgctgtttgaccaccgaactgtacaaccacaccttctggtttttctaaatcgatgatatgcatcacatcttcaatcgtcagcggctcgaagtataatttatctgaaatactgaagtcagttgatactgtttctggattgttattgacaataatcgcctcgtatccagcttctttaatcgcccacacggagtgaactgttgcatagtcaaactcaattccttgcccgatgcggattggtcctgaccctaacactacaacgcttttacgatctgtaacaatcgattcgttttcatcttcaaacgtgccgtagaaatatggtgttgtagattcaaattctgctgcacatgtatctaccgttttgtatactggcatcacgccattttgtttgcggaagtcatatacttcacgctctgtttgattccacagcttagcaatcgtgcagtctgcaaatcccatttcttttgcttcctgtaaaacttctacgttatgaatctcttcttttaacacattttcaaaagcaatcactttttcaagttttactaagaagaagagatcgattttgctccagtcatgaatttgctgaattgttacgccgcggcgaatcgcttctgcgatgtagaataatcgctcatcaccagctttgcgaatacgtttttcaataatggcatcatcaaattcatgcgcatctttcagctctaagtgatgaacgtttgactcaagtgagcgtacagcttttaaaattgactcttcgaacgtgcggccaattgccattacttcccctgttgctttcatctgtgtacccagtttacggttagctgattcaaatttatcaaacggccagcggggaattttagatacgatgtaatctagtgctggttcgaaacatgcgtatgtcttcccagttaccgggttcatcatttcatctaatgttaagcctaccgcaatttttgctgctaattttgcaattggataccctgttgcttttgatgctaaagccgacgagcggcttacacgagggtttacttcaattacgtaatactggaagctttctgggtctagtgctagctgaacgttacatccgccttcaattttaagcgctcggataattgttagtgacgcatttctaagcagctgatactcacggtcgcttagcgtttggcttggtgctacaacaattgaatctcctgtatgaataccgaccggatcaaagttttccatattacatactacaatcgcattatcgtttgcgtcgcgcattacttcatattcaatttctttaaagcctgcaatgcttttctcaagtaagcactgtgttacaggactgtgttttaatccacttgttacaatttcaatcaactcttgctcgttgttacaaattccgcctcccgtaccgccaagcgtataagcaggacgcacgattaccggatagtttacttgttcaacaaacgcatacgcttcgtctagcgaatgaatgatttcacttgctgggacaggctgatttagttcattcattagtgaacggaactgctcacgatcttcagcttgttcaatcgccgataattttgtcccgagaatttctacattaaattcttctaaaatacccgtttcgtgtaattctaccgctaagttcagtcccgtttgaccgccaagtgttggaagcagtgcatccgggcgttctttacgaataattgagcttacaaattcaaccgttagaggttcaatatatactttatctgccatttctgagtctgtcatgattgttgcaggattggagttcacaagaataactttgtatccttcttcttttagcgcaatacacgcttgcgctcctgcatagtcaaactctgccgcctgtccgatgacgattggtcctgatccgattacgagaattgtgttaatatcttgacgttttggcattagcaattacctactttctgattgtttttcataagatccataaattcgttgaacaatccgtttgcatcttcaggtcccggtgatgcttcagggtgatattgaaccgtaaatgccggatattctttatgctttactccttcaactgttccatcgttaagcgcaacatgtgtcacttctaatggcgtgttgacaagagatggctcacatactgtatagccgtggttttgagatgtaagagctactttattggtttttagatcctttacaggatggttggatccacgatgaccaaatttcattttttctgtatctgctccgcatgctagcgcaaacagctgatgtcctaaacaaattccgaaaagaggaacctttcctaaaaccccttgaatcatctcgattgcttcaggtacgtcttttgggtctccaggtccgttgctcaacatgatgccatctggatttaattgaagaatttcttgcgcagttacgttataaggaaccacaatcacgtcgcattgacgagctgttaattcgcgtaaaattccgtgtttcattccaaagtcaacgagtaccacttttttacctctgcctgggcttgggtaaggcttcactgttgatactttttttactgaatcagtcggaagttcatgattttgaagctgtgctaccacttcttctacattgacttccatgttgcacacgcgtccgcgaagcgcaccgtgctgacgaatttttctcgttaattttctcgtgtcgattccagctaatcctggaatatctttttgttttaaaaattcatctactgatagttcgcttctgaagtttgaaggagcatcacaaatttcttttacaatcaaaccgtgtacagctggttcaatcgactcaaagtcatcgcggttaataccgtagtttccgattaaaggatatgttaatgtcacaatttgtgcacagtatgatggatcagatagaatttcttgatatcctgtcattcccgtgttgaaaacaacttctcctatcatttctttgtcgctgccgaatccttttccgataaatactgttccatcttctaaaattagttgacgttgcatgctttaacatcctcccatactcgtttaccttctactaatgtcattaccggccaacctttgcatacccagttagcaaacggcgtatttttaccttttgatacaaattcttctggattaattgctttttctgtttcaagatcaatgatagttaaatctgctggtttccctacttcgatggtgccataaggaaggttgaacgtgtcagcaggcttgtttgttaaatatgatactagctgctctagcgtcattacttcttttaataccaagtttgtataaagaagcgggaaagctgtttcaagtcccacaatcccaaacggcgcaagctccatgccttctgctttttcgtcggctgtgtgcggtgcatgatcagtggcgataaaatcaagcgttccgtctaataaagcttcaattaatgcctgttgatcatcttttcctcgaagcggtggattcattttaaaatttgaatcaagctcagggatgtcttcctcatttagcagtaaatgatgaggcgttacttctgcggttacgcgaatgcctgctttttttgcatcccgaatggcccgaatggattcttttgtacttacgtgacacacatggtagtgacagtttgctgcttcagcaagcaggacatctcgtgcaatttgaacggcttcacagatagaaggaataccgtttagtccatgttcttttgcaaattttccgtcgtggacgcagcctttgttgattaaatcattatcttcacagtgtgcaacgattgctttatttaatgaagcggctttcttcatcgcttctagcatcattcctgttgactgaacgcctactccatcatctgtaaaagcaaatgcgcccgcttcttttaagccttcaaagtccgttagttcttttcctaattggcgggtggtaatcgatgcgtatggcaatacgcgaacatgtgctgttttttcaatacgcttgtttacccactccatttgttcaacagtatccggaactggacgcgtgtttggcattgcagcaattgctgtaaaaccgccctttgccgctgctagagtacccgtttcaatcgtttctttcttttctccccctggctcgcgcaaatgaacgtggacatcgattaaacccggtgataagaagttcccgcctgcatcaatgacttcttcattctttacgtcgatgtgtgaagctatttcagcaattacaccattttcaattttcagttcgacttgttcaattttcccttcatttaaccatgtagcatttttgataattgttgtcattattaagtcccctttcaattggttgtagcgctcttgctaatactgccatacgaatgtacacgccattttgcatttgtttaaaaattcttgagcgttcacattcaacgagctcatctgcaatttcgactcctctgtttacaggagctggatgaaggataatgctatgtgatttcattttccgctctcgttcaacggtcaatccgaagcggctgtggtagttctgtgcaagctctgaagtgttctcttcatgcctttcaaattgaatacgcagcagcatcacaacatcgaccgtttcgattgcttcatcgatatcaagatatgtaccgtgtctgttctcttcatctttccattcttcaggtcccgcaaaatatacggtcgcccctagttttgtcagcatttcagcattcgatctcgctacgcggctatgtcgcaaatctccgactattgcgacttttaatcctttaaacgagccgaactcttggcgaatcgtcagtagatcaagcagacactgagttggatgctgaccgcatccgtctcctgcattaatgatgggaatcgatactttttcctgcagtgcttcataataacgatcttgcgggtggcgaataacaactgactgaacgccgattgaagctaatgtttcaatcgtgtcataaagcgtttctcctttttggacgcttgaagttgttacttcaaacggaattgttgttaatcctagctgctgttctgccatttcaaagctgcatcgagtacgcgtgctcgcttcaaaaaataagttggcaacaaacattttctcttccggtttccagccttgtttattcgttcgatagttttcagcgctgtctaaaatctctagaatttcatttgtttctagtgttgagactgtcactaaatgtttcatatcgattccctccatttttgctttcctcgcatttctttataaaaaacaccctttctaacttagaaagggtgtaagaaaacaagcttcgtctataacgcgcttttcacacacccttagaaacctctctggatttcaattaaaaggcgttctatgaaatttttcgtgctgacgtttgttgaacgttttctgcttcttttatcttctctttcggcagaactagattcagcagaactcccatgatagcagacagtgccatgctatcaacctttacatgttctgagatatctaagtgtgctcctccgattcctaacactaagataatcgaagcaatcattaagtttcgttttgatccaaggtctacctttgcatccaccatcatgcgcaagcctgatgaagcaatgattccgaataagagaattgaaatcccgcccatgaccggcgttggtatacttgaaataagagcgttgattttgccgacaaacccgaacaaaatcgcgaagactgctgctcctgctatcacaaatacgctaagcacctttgtgatggctaacactccgatgttctcaccgtatgttgtatttggcggtccgccgatcagcgcagcaagcatagttgctactccgtctcctaaaatcgatctgtgcagccctggcttttcaatatagtttcgatccacaatcttatttaagacaagaatgtgtccgatatgttctgagagtgttacgactgctacaggtaccattataagcacaatccctaatgaaatggacggcgtgtatgtgacgaacggcacgtagaagtgaggtacttcaatccactccgctttcactacctttgaaaagtctaccaatccttgtgtataagcgaagatgtatccgccgataattcccatcagtaccggaatcaggctgataatgtttttaaagaagattgagcaagcaactgttatcgctagtgtcacaagcgcaaccatcaggtaagttaagctgtaatttccttttgcatcgttcatagccatgcctactgctgtattagccagtcctaagcctataaccataataactggtcctactacaaccggaggaagcagcttcataatccaattgattcctgttccttttataatcaaagcaacgattccataaacaagtccggctaagaaacaaccaaccatcgtttcttcaggtccaaacgaagctttagcgaaaatgattggcgtgatgaacgcgaacgatgaaccaagataagaaggaatttgacctcttgtaatgagcaggaaagcaagcgttcctaccccgcttgaaatcaaagcaattgccgggctgaacccgactaggaacggcactaacaccgtcgacccaaacattgcaaacaaatgctgtagactcaatgttaaccaatttactgcttttggtttatcatgtatatcaagtacaaaatctcgttgttgactcatatgtttttcctcctatcactattaaaaaacctctttacgcagaggcaaagaggttttcagcatacaaggaagacgctataccgcagtatagttttccttgtatagtgaccccccttttgcagcctcacgggactaccatttaaaagggtatataatttatttttcgtaaatagacacgtggtctttttcgtctacttccattaaatgcaccgcaattttttcacttttagctgtcggtacatttttaccaacatagtctgctcgaatcggtagctcgcggtgccctctatccactaagacagccagctgaatgagttcaggtcggccgatatcaatcagtgcatcaagtgctgctcgaaccgtacggcccgtatataacacatcatctactaagatgacgttcttatttgcaatatctgtcggaatatctgatccttttacaagaggctcatcattgcttgtcactttcgataaatcatctcggtaaagcgtgatgtctagttctccgactggcaatgtatttccttcaatttgtgcaattcgttctgctaaacgttttgcgatataaatacctcgcgttttaatccccactagcacacaattttcgattcctttattcttttcaataatctcatgtgcaattcgagttaaagcgcggcgtatagcctgttcatcaagtacggtagcttttacgttcactgttttcacctcaagttgttgacataaaaaaatcctcttgccttgaggcaagaggatttggttttaaacatatttcttcaaaaaggctataaatatgccttttctgcaccgtttccttctcagcctctctggactgttcttaaaggttcttattaagttaatacaagtatgccatcacttatggcagttgtcaacttcttttttcaataagctctagcatctcattaaactcttttggagccggtgcttcaaattccatatattcatttgtacgagggtgaataaagcctaatacacctgcatgaagcgcttgtccgtcaatcggaagcgtttttttcggtccgtacttcggatccccggcaagcggaaaaccaatatacttcatatgaacgcgaatttggtgtgttcgccccgtttctagcttacattcgactagtgaaaaatctttaaaacgctgcaatacagtaaagtgcgtcactgcatcacgactgttttcatcagtcaccgtcatgctttgacgatcttgtttatctcggccgattggcgcatcaattgtaccgtgatcgtgcgcaattactccgtgaacgatagctttataacgacgcgttactgttttagctacaagctgactaactagtgattcatgagctaaatcattttttgcaaccataagtaaaccggatgtatctttatcaattcgatgaacgataccagggcgcataacgccgttaataccggataaatctttacagtgagccattaggccgtttacaagcgtgccgctatgatgaccaggagctggatgtacaaccatgccgcgaggtttatttacaacaagcacatcttgatcttcataataaatatctaaatccatttcttccgctaccacatcaagctcttctagttccggcacttcgataataatagcgtctcctgttttacatttatagtttcctttaacggttttatcgttcacttttgcgtgaccttctttaatccattgctgcacttgtgaacgtgaccattctgcatttacagtcgaaagtactttatcaatacgttctcccgcttgttcttcatttataactgtttcaattacattcattctttgtgctccttcttcattttcccttcaaacagcgtcataataaacatgatgattactccgacgacaagtgccgaatcagctacgttaaaaatcggaaaatcatacgtaaagatgtatgtatttacgaaatcaactacttctttacggaccactcgatcaataaagtttccaatggcgccgcctaacattaatgctagcgcaataccgaaccatttatcttgttttttgagcttttgaatataaattattaaaccgactaccacaaccaccgtaatcagataaaagaaccacatctgtccttgtaaaatcccccacgcggctcctctgttacgatgagaggtaatgtaaagaaagttttcaatcacggtgatgctttgtccataatacatttcttttacaatcatccattttgttacctgatcaataagtataacagctaaagcgataagataataaaacacacacgttttcctcccgcaataaaatcaaacgaatccatactaaagcattttagcacataattcattttttttctcgcttctcaccataaaacaaataaatcttcatttgtgcgggccgtcggcattacttttaatttatgaatagacatcacttcgccagttagttcatcaattccgaacgcaccaacgtcaagctttgctaacgcgtgttctacatcttttaaatcggctttaatcatttctattacgtaacgttccttttcatctatataaccagattgttctgtagcatatctcaataggcgatcttgtaattcttctttaataagagctaattcctgtccaatggaaagataattttcatacatgcaaacgcctcctgtgctgataagatgaagtattaatgatgttaggtttaccgagttttccatcgaatctacaacacaagtttttcctaaggctttaaatgctttataccattgtatttgggaatttcgtacagcaaaaaacacgcccaaaaaggacgtgtttttgttaattactgctgaacgtagtgattttttacaacatccgcacagcgtgtacataaagtcgggtgatcttgatcttcgccaactgttggtgatacaacccagcagcgctcacacttctcaccttctgctttacttacaacaattgaagcatagctgaatttttgtgcttcagcaggtgcttcaccttctgctacttcaagatctgaaacgatgaagagttgacctacattttcagaaatagatgctaacagttctttcgtatctgctgttggatatagcgttaattttgcttctaaagacttaccgattactttttcattacgagcctgttctagcgcttttaatacttcatcacgaagctccatgaatgcatcccatttctctactaattgatctgctccttcgatttcttgaacctctggcatatcaactagctgcacgctttcttccgttacatttggaatgtgaacccatacttcgtctgctgtatgagaaagaattggagacactaatttcgttaacgataataacgtttcataaaggaccgtttgaatgctgcggcgctctacattattttctgcttcgatgtacaatacatcttttgcaaagtctaagtagaatgaactcatatcaattgtacagaaattatgcactgcgtgataaatgcttgagaattcatatgaatcataagattttttcactttatcaattaatttgttcagcttcacaagcatgtagcggtctacttcacgaaggtcttcaacggctacagcatcagtcgttggattaaagtccgctaagtttcctagtaagaaacggaacgtgttgcggattttacgatatacttctgctacttgttttaaaatgttatcagatacacgaacatcagcttggtaatctacagaagctacccataaacgtaaaatatctgcacctagttgtttcattactttttctggaattacaacgtttcctaatgacttactcattttgcgaccttcaccgtctaaagcaaatccgtggctaagtacccctttataaggtgcttcacccgttacagctacacttgtagaaagacttgaattaaaccagccgcggtattggtcagaaccttctaaatacaaatcagccggacgctgtaagtcttcacgttcttcaagaacagcttgatgtgaagaaccagagtcaaaccatacgtccatgatgtctgtttcttttgtgaagcggccatttgggcttccttcatgagtaaagccttccggaagcaagtcttttgcttcacgctcaaaccatacgtttgatccatgttctctaaatagatttgatacgtgttcgattgtttcgtccgtaatgattggctcctcattttcagcataaaataccggaatcggaacgccccatgcacgttggcgagaaatacaccagtcgccgcggtcacgcaccatgttataaagtcgcgtttcaccccaagtaggcacccattttgttttttctactgcttttaataaatcttcacggaaatctttaatagacgcaaaccactgtgctgttgcacggaaaattgttggtttctttgtacgccagtcatgtgggtatgagtgggtaatgaaacttaattttaacagcgcgccttcttcttctagtttgtctgtaatcggcttattcgctttatcatagaataacccttcaaatcctggtgcttcattcgtcatatgacccttactgtcgactggacaaagaacttccaaaccgtatttttgaccaacgataaagtcgtcttccccgtgtcccggtgctgtatgaacacacccagtaccagcatccgttgttacgtgatcgccaagaacaactaatgaatcacgcttgtagattggatgctcagctactacacgctcaagttctgaaccttttactgtacgaagcgtcttatagtcagcccattcaatttctttagcaactgtttcaatcagttcagttgccactacatattttgctccatctgcttcaactacgctgtactgaagctcaggattgacagcaatcccttggttagctggcattgtccatggtgttgtcgtccaaatgatgaatttttcatcttgttcaagcacacctttaccatcttttacgttaaacgctacgtaaatagaagctgaacgcttatcatagtactcaatttccgcttctgctaaagcagattcacttgaaggggaccagtacacaggttttaaccctttgtagatgtagccttttttcgccatgtcaccaaacactttgatttgctgcgcttcgtactgcggctgaagcgttacatatggattatcccaatctccgcgtacacctaaacgcttaaactgctcacgctggccgtttacttgttcccaagcatactgttcgcaaagcttacggaactcagctaccgtcatttctttgcggtttacttttttattttttgttaaagctgtttcaattggcaaaccgtgtgtatcccagcctggtacataaggtgcgcagaagcctgacatcgacttatagcgaacgataaaatcttttaaaattttatttaatgcatgtcccatgtgaatatcgccattcgcatatggaggtccatcatgcaggacaaatagcggacggccttccgtacgtttttgtactttttcataaatattcatttcagcccactgttcttgcattttaggctcgcggttcggtaaatttccacgcattggaaattcagtttttggcatcaataatgtatctttatattccatgttttaccctccaaaaaaaacgtaaatttcatatctttttgtaccataacaaaaagacctcctcatcccaaaaagggacgagaaggcctcccgcggtaccaccctagtagatttgctgtacgcaaatcctctttgcattcgtaacgtgaataaaccgccactgcttactatcatcagttcagcaatggtactctagggtgattttcacttttttgtttgttatcgagctcacaccatcctcgattcgctttgacaaactaaaaaagctactgtccctgtctccgtactgtttgatatgaaatttcatctgttaccaaattatatgacaacaaaacgtgagaagtcaagatgatgtctggactagtcaattttttcttctagcgctggcatctcataatccatcaactgatcccagtcgtcgctgtttaacatttcaagctgtgcttcgattaacattttgaaacgagttctaaatactttagactgctttttcgtctcctcaatgtccatcgcaattttacgagacttagacagtgcttcattaataatacggtccgcatttttttctgcttcttttataatgagcttcgcttctttttcagcgtttcgcttcacatcttccgctgcttcttgagcaattaaaattgatttatttaacgtttcttcgatgttagtaaaatgtccaagacgatctgttaattcagatactcttccttctaactcctttttatcacgcatgaccagctcatagtctttaattacttggtcaagaaactcatttacttcatcttcatcatatccgcgaaatccgcgattaaactctttgttatgaatatccaaaggggttaaaggcatctaggccacctccgtgttgtctcattacgtcattagtaatggtttattcgacatatttttaaaatttcctgctagtagatttctttatttctgctttcctacaacaattcgccatttttcttttttggtttttccttcaagtgaaacgatacgacttctgccgtgaccacgaagtgacaaaatatcaccttcatgacattcaaaagaaggctgttcaatgactttaaaatttacttttaccgctccatttgcaataaacggctggactttttgtcttgataaattgtgaatggtcgacagcaaaacatcaagcctcattgaagaaactgtataaacgtgttcaaccagctcttcttttacaacatgcagctgctctctttgaatagaagaaagtgaaactttggcttttccaattgatgttaaattcatctcaatataagaagaaatttcctctgcaactacgagctgaatatcgtctcccgcgaccaaaatatcgccaaattttgaacggcgcagtcctaaggacatcgccgaaccaagaacttgaggatgttcaatcttcacaaactttttaggataattgagctcgtacatatgcaactgaaaatcttcactttcaggtacatagtaatccgggtatagcagcgcgcgcttgcgttcagcaaacggttgtccaccatcaaatgaaacttgaacctctccttcagtcccgacaatagccgtcacaatatgctgctctcttggatctaaaaagtccgttagctttgggctgtattgatgtaggacatcttctttccactgaagaacctggtcaataaatccatgttcttcttgcctaaaatgttcataaatagacatattattactcctactattggtatgtaaaaaaggaatccagcgattcctttttaaataaatccaaccatactgtgaagtgaacgtacacctgcttgtgcaaatcgtagtaaaaagattgcgacaagaggtgaaatatcaatcatgccaataggcggaatgattttacgaaaaggctctaagtaaggctcacaaatgctgccaagcagctgaccaaacttagacgcccttacatcaggtacccaagacatcaaaatgtaaataatcagtgcccatgagtaaagaccaatcaattgtccaagaatcccaaaaacgatgtccaaaaactaccacctctttacgtttgttgtatcatgttctcccatcatatctgaaatgcttccgcttacgtctacattatcaggtgtacataaaaagatgtcggttccaattttttgaatgtccccgcctaaagcataaactgtaccacttaaaaagtcgacaattcttaccgcttgatctcgttgaatgcgctgtaaattcacaactacgactttacgattttttaaatgatccgtaatttcttgtgcttcggcatagacgcgaggttcgcaaagcatcatttttgatgatttttgaacgctttgcaagctaatcacgttttgctgctgattcggctgctgactagctttcgctggtctcgactgctgtacaggctcttctaccgactcttcttcttcgtaatgttcttctacatattcagtatcgtcatcaagagcaaaaaaacttctaaagcgatttttcatactcatcttgaattacacctccttaacgttcattcccaactaacgtggttcctagtcgaatgaatgttgctccttcttcaattgcaattgcataatcgtttgacattcccattgatagctctgtacacggtgcatatggcaaatttagttcttgtatacgactctgcaatttttttagaccttgaaaacagctgcgaagcgtagactcttcatctgtgtgaggagccatggtcatcaatccgaccacttggatatttgcaaatgcttcaagagattgaataaatggaattacttcttctacagcaaggccatgctttgattgttcttcggcaacattaacttgtacaaaacattttatacgatgttctgcacgtttatcaatttcttttgctaaagataatcggtctagtgaatgaatatagtcaactttatcaatcacattttttacttttcttgtttgtaagcttccgataaaatgccaggtcgctttctcaccgattgattcatacttttctagaagaccttcatccctgttttctccgagatgtaaaatgccggcatccactgcttctgctgctcgttttgtggaaacgtattttgttacagcaatcagctctacatcttctcgatttcgattaacttttttacacgcttcagcaattgtttgttgaactgcttctagattttcacttacgctagctgtcactatgtaattactcctccttaaagcctatgaagttaaacatgcgtcctgttttcccttggtcgcggcgatgtgagaagaacaggtcatcttcacagcttgtacaatacgacgatgttaaaattcgttccggcaatacgcctgcgttttgaatcaggagcttattgactttttttaaattaagcgcgtattgtccaggacttacttcttgatatccattttggccaactacttcgtttacttgtgtaatgacgcggttatcgacgacataacagcaatcttcaatcgaagggccaatcgccacgtaaatatcttcaaccgggacattttcttgctctacccaacgtcgaatcatatttcctgcaatatctttcactgttcctttccacccagcatgagctagacctactaaatggtgatcaggcgcatagaagtaaagcggaacacaatctgcataacataaagctaacaaaatatcagattcatttgtataaatgccatccgttgcttttatgccctcttcatacttgtagagtccttttgcacagtcggcttttgttactttttgaacagttgcttcatgtacttgttcagcacatacaaagctttcaaaagacatgtctagttcggctgctaaaatttttctatttgtaataacatcttctacgttatcgtttacgtgaagccctaggttaaaagaagcaaatggaggtttactcacgccaccattttttgtggtaaaaccagcaacaagtatatcattcttttctacccaagggctcagccacataaacgactcgtgatggcttttttttaatggctcaggattcatgtatgtgacacatcccttgtttcatttgttctcacatattgtaccacagattgctaggtgctgttgacaaaaaactaattctcttcaggctgaaatgcgtctttataacgtactaaaatgacatcagaaccaattttcacaatatttttccatggaatcacaatttcatcatcttttccaaagaagcccaatacacgagagcctccgataatgacggcctgtatttttcccgttgttaagtcaatatcaatatcccctacatttccaagttttttgccatcagctacattcactacatctttcagctggaattctgaaatctttaacatgctctctcctcctatagccaactttattccttagcctatatatattttcaaattttcatttcatgaaggaaaagcttattttttctctgccattctcgttctataggcattttgtccactaattacacattttttcatcaaaagacattctcaacgagtagctagaagtcctcacagcaataggaaaccggatatgaatatcttttggtcatgtattatacattgatatatacaaaataagcaccgtgtctgtttttatagacacgatgcttattaagttgaacatcaaataaagtgaatggtattaattgtatgaacgcgagcagctgccagtttagatagcttttgttaactttgaatatttttattcatctgtttaatagcagctttttctaaacgagaaacctgcgcttgagaaataccaatttcttcagcaacttccatctgtgttttaccttggaaaaagcgctttcgtaaaattagtttttctcgctcgttcaatcttctcataccttcttgcaaagcaatttcttcaatccaagttgaatcacgattgcgttcatcgcttagctgatccatgacatagattgggtctccaccatcattgtaaataggttcaaatagagaaaccggatcttggatagcatctaaagcaaacacaatttcttcatgcggcacttctaggacttttgaaatttcctcagctgtaggttccttggatgtttcactcataagcctttcacgaacttgaagagctttataagcaatatcacgaagggaacgagaaacacggattggattattgtcacgtaaatagcggcgaatttcccctataatcattgggacagcatatgtagaaaacttcacgttttgacttaaatcaaaattgtcaatggatttcattaatccaatacatccaacctgaaataagtcatcaacaaattctccacgattgttaaaacgttggatcacgctgagtacgagacgtaaatttccgcttactagcttttctcttgctgttccatctccagcctgcatttgtttaaacaactttcgcatttcttcattttttaatacgggaagtttcgaagtatctactccacaaatttctactttatttcttgtcaactctttccctcctaacaggagatgatgttctgaattcagtatctcctcagaaggaaaaaatatgcacttttacaattctgacaattccacgctaaaaaagctgattggataagatgcttctcagcccttatccaatcagcttttttacttaaaccattttattaaattcttttcgcagccgtttaataattcgtttttcaagccttgaaatataagactgagaaatgcctagcatatcagctacatctttttgcgttttttcttctccgccggctagcccaaagcgcagctccataatttgcttttcacgatcatttaattggtgcagtgctttcaacaaaagttttcgatccacattcgcttctaggtcttttgtgatgatatcttcttcggttcccatcacgtcagataatagcagttcgtttccatcccaatcaatatttaacggctcatcaaatgaaacttcagatcgaattttgttgttgcggcgcaaatacattaaaatttcattttcaatacagcgagaggcgtacgtcgctagcttaattttcttttcaggattaaacgtgtttactgctttaattaaaccgatggtgccaatgctaattaaatcctcaatattgattcccgtattttcaaacttgcgggcaatataaacaacaagtcgcaaattacgctcaatcaacagcgaacgtgctgcttcatctcctgatggaagtttttttaagagcacttcttcttcatcttttgttaaagggggtggaagagcttcacttcctcctatatagtacacttcatctgtttttagcttaagtttaattaacaatttgtaccaccataattgaaatcgaattcgatatgtagccattttgtatcctcctttatttgttcacaccttttacgatgcggaacttacttctccaataacaataagcttcggatgaacaatacactcatattgcttctccactgaaagcgttgtatgactaatacctactaatactttagtgacttcaatcgtgttggactgatgcaccagccttaccatatctggctttagagcaagcagcaactggttggcttggcctacgcttcgataagggacaaagcggacttttgaataccactcttgatcaatatcttcgctgtgtgaaaaggattggacatttttgcttaattccattaagccttcaggcaatatttcctttaaagaatctgctgtaacaatcataaccggggttttcgtcagcggatctacaagctggtttccactatcaataagtcctttcatcgacagcgtctgttcgtttaaaataacttccacatctaccagctgatcaaatgtaatatttttcattcgcaaatcatcaactcgtgcttttgaaaaataagataatagcggaaaaccgataagaacaaatatccagctaataggatcaccaaactgtggagatttcgtatcaaccatttgattaagaacaaggaactgatcttgaaataaaaagtgaacgcccattaatcctccaccaacaacaaaggttgcaaaataaaacgttaataaattctcaaagaaaaagcgcagtcgtttataaccaaacgtcatcaataccataaaaaaagagaataaaattttaatagcagggtgaaccataagatgagaaaaaggcgtaaacataagaaggacaatcaatgaaccgataaagccgccaagcaaaagcctccaccacttgtaattccgtttaagtacaactgcacataacattagtaaaatcgtatctaatccaaaattcagcatccatattaaatctaaatagattggcaatgtttataacctctccattctttctgaatttttctgttaaaaattagtatatagtacatcctattagaaagtctgtcagttcatgccgagaaacaagcagtatttttgaggaaatcattcgatatttgtcacaccacttttagaaagaaaacacaaaccctttgaaggcatcatattgaccatgtcgaatgctttttatatccttttggagttttctagcttcatggcataaaaaaagacctctgtataaaacagaggtcttggctttttattttattagcgtctacgattacggtttcgtaagaatgttggaatatctagcgcatcttcagactgtggctgagatggacgcgtatattcttgctgtacaggttcttcacgctttacttcacgcttcggctgtggagccggctgctgtgtcgattgctgcatgcgattcgccgataacgaaggacgacctggttttggctgtgataaatcttggtcactaaagccagttgcaataactgtaacaacaatctcgtcttttaggttttcgttaataacagatccaaagatcatgttcacttcttggtcagaagccgaagcaacgatatctgcagcttcttgtacttcgtaaagacttaggtttgtaccgcctgtgatgttcattaatacaccctgagctccatcgatagatgtttcaagaagtggacttgaaatagcttttttagccgcttcagcagcgcggttttcaccagttgcaataccgatacccataagggcagatcctttgttagacataattgttttcacgtcagcgaagtctaagttaattaatccaggaactgcgattaaatctgaaataccttgcacaccttgtcgcaatacgttatccgcttcacggaacgcttctagcattggcgtgtttttatcaacgatttccaataagcgatcatttggaataacaatcagcgtgtccactgcttctttcattgacgcaatgccgcctgccgcttgagtagaacgcttacgaccttcgaacgtaaacggacgagtaacaacacctaccgttagtgctcctagctcacgagcaatttgggcaatgactggagctgcaccagttccagttcctccacccataccagctgttacgaaaaccatatctgcaccttttagggcttcttggatttgttccttactttcttcagctgcttttttaccaacttctggattagcacccgcacctaatcctcttgttaatttagcgccgatttgcatttttgtttcggcttttgataaatttaatgcttgtgcatctgtattaactgcaataaattctacaccttggacgccatgttcaatcattcggttaaccgcgttgttaccgccgcctccgacaccgattactttaatcgtcgctaattggtctacacttgtatcaaactccaacatgatagttcctcctaattcttcgaaattaccaatccgtaacgttaatcaaagaagtatccaaaaaacttcttcattaaattttggtcatttttccttttcggctgctcagctgattgttgcggctgctgtggtttcgggctaggtttgatcatttcttgctcaatcggctcttcttccacaactggcgctccaatttcccggccttgtattttagcatttttgtatgcaaattttattaatcctacgcctgttgtataatgcggctcacgtactccaatataatcaggcactgctatgcgcacgttattctttaaaatcacttgagctagctcaagaataccaggcatcgctactactccgcctgttaaaacaaatcctcctggaatatctttgtatcctaggcgatttacctcttgcgtaatcatatctaaaatctcttctagtctagcttcaataatatcagagatttcgagctgattaaactgctgatgctgatcgcttccaatgatcggtacactaaatacttcttcttcagaagcatgatcgtagaaagcatgtccatgctttatcttaatattttccgcatcttcagtcgatgtgcgaaggccaatcgataaatccttggtaatgtgctctccgccaacagctagtacatttgttactttcaaatgtccttggtcaaagatcgcaaccgttgttgaacctccaccgatatctaccagtgcgacacctaagtttttttcatcacgagataatgcaattgaaccagcggctagaggctgtaaacaaatatcactgatttctaaaccagctctttctacacagcgtaataagttatgtaaaaccgttctagatcctgttatgatcgtgccttccatttctaaacgtaccccaatcatacctctaggatcattaataccttctaagccatctacaataaattgctttggaataacatcaatgatttcacgatctggcgggatagacatgacttgagcagcatcaattactcgatgaatatcttcgtttgtaatttcacgattctcgcttgacacggctactactccgtgacaatcctgtaaaaatacatgatttccgcttatgcccactacaacctttttaattgtaatgcctaccattcgttcagcttgttctactgcttttctaatagattgaactgttgcatctatatcaacgatagaacctttttttagtccgtgtgatttaacattccctacaccaatgatattcaatgaatcgttactcatctctccgatgattactttcacactggatgtaccgatgtctaaactaacgtatatttcattgctgttcattctttggcacctcctttttctttctgcacatgtcatcttaataaattaagaagaacaacaatattaattttttattatatgaaaatattcaacaaatacatctgtttcccttttgtaaaatcaatttttttcaagtttttcacagactttatctctttcaaagaacaaaacgttctggttttgacttttttttagatttaagcctaaaattcactgaaaaaagctatttaactacaagtctacactaagatgtacactgagaaaagcgaaacttacctagaacaaatattacatttccatttcacagcaacggagaagaaaatcatatgtatgcagaatacttgcatgtgattatacaatgtacgagggctagtttgccagtctcaactcatctatttcctttaattaacacttataaaaaataattactgcttgctctttttataaggtttaaatgcatatccttcttctaaatcaataatacctttttgatcatcactcaatttacttgcaatagccgggtaatgaacaattttatcagagaagttgctaattttcccgcttacttcacgcgtatcattcataaacacctcgatgtgaagaggttctgattttgtcggcgcgtagtaaatctcagaaatagccccttttatgctcttaggcgttttagctaattcttgaaccatgctttgtatagcgtctccgtctttccagtcaattagcagcggagcgtcggatgacactttcttagcacttacttcttttagaactttcccattttcattcacagggaaatatttattccccgaggttacatatgcaattcttgcgtactcttttacgtcgattacgaccttattaggaaatgttttgtgaatgacagcttcctttacctcagggtttttttcgactttttcttgaatttgatcagcatcagctttccagtagctggtttttttggacagaccactcgctttgacaatatccttatcacttacatgtttattcccttgtacttcaatgttagaaacattactcagagaagattgagaatatacaataaataaaataaggatgaaaaagagtgataaatacaaaatcagccgtctatttgctttttgctttcgctgttcttgcagcttcggtacccgatcttctaaaacaattaacttacctttttccatttttttcacccttatccatttgagaaaataaacgaggaattaccatctatttatttccaatctttgcttcatgagaatatccccattatagcatagaataaacacataaaagctaccttttcacgcataaccatacagccacgggctgggtaattagcgaccgataatctcaacttctgtatgaatatcaatatcgaatttctctttaattgttttcttaacatgagcaattaaattcagcacatctgaagccgttgcatctcctgtgttgacaatgaagttcgcatgctgttcactaatttgcgccccgcctactgaaaaaccttttaagttggacttttcaattaagtctcctgcataatttggaagcggatttctaaaaatactgcctgcacaagggaaattccaaggctgtgtttcgcggcgatagtctttatttttctgcatgaccgccacaatatcatctttcgttccctttttcaaacgcagcacggcttctacacatactccaggacggtctttttgtagaattgaatgacgatacgaaaattgaagctcttcatttgtcagccactcaagagtgccatcttcaaataaaataagcgctttttcgactacatgagacatatcagaaccatgggcacctgcattcatataaacagcgcctcccacagatccaggaattccacttgaaaactccagcccagacagaccttgttttgtaataactgttgcaagcttgatgctagggtatcccccacctacagtaaccgtctctccatctactgttaaatcatctaatccggctccgagcttaatgaccacaccttcaattcccttatcagaaacaagaagattagatcctcgaccaatcgctctccatttcacgccgtgttttttaataatatccattgtaacttttaagtgatcaacagaatcaggttctacaagcacatctgctggaccaccaattttcattgttgtatgttttgctagcggttcattttcacgaacctttccaatattcgcttcgactaactcttttactaacgcttccataagaacctcctaaaaccctctttgctgttataaaactttcatgtcaatgcgcccttacttctaatgcataagaataataagaacagattcataactaagcagcagcaccttgtaagataccttttttctaccaaggcactctattctgttgtcaatttcatcatttttatttatcgtatgacattcacccatagaatgtacgttcatctgctatataaagtaattttgattgtttttttatcgtttttcatttagaagttaaacacatgctgacagtcataaaaaaacgctacgctcataagtgcacatacgttcacctaatcactaagataaaacatttaaccttacacatcataccatagttggactcaaaattggttatcacaacattacattttaaaaacatttcatacaaaaatatcatctacctgtaaaaaatcgaaaataaaccgccaacaaaatccggcgtgcacttggatttaagatgacggtttacttcagtagaccattgcctacttgacattatacaatttttttcaattaatagcgagaatatctactaacatttaacaaaactccaactgctgccagcatgagcgtcagcgatgatccgccgtaacttaaaaatggaagcgtaattcccgtaacaggcataagacctgttaccacgcctatattaatcatgacttgaatcgcaaccattgaaataattcctaaggctaaaaacgttccgtaaagatcaggagctccgagcgctactttaattcctctccaaagcaataagctaaacaaaagaagaacaagcgttccgccaatgaaaccgagctcttctgccagaatagcaaaaataaaatcagtttgaggctccggcaaataaaagaacttttgtctgctttgccctaaccctaatccaagcaatccccctggcccaattgcataaagagattgaatgatttgaaacccgcttccaagcggatcttcccaaggatttaaaaatgaagtgatgcgtttaatccgataaggagccgataaaacaagccctacaaaaccggcaacgccaagcaacccaagacctgcaaagtgacttacttttgctcctgaaacaaaaatcatgactaaacaagttccaacaagcaccgttcccgttcctaaatccggctgcatcataataatgccaaacggtaagaaaaccagtaataacgccggtaacatgccttttctaaaagacgtaatcttcttctggttttctgataaatatttcgctaaaaatataatcatagcaaacttcataaattctgaaggctgaatcgaaaacgctccaactcctatccaactttgcgacccattccgtactagccctactcccggaatcaatacaagtaccagcataacaaagcaaatgattacaattggcttcgcccacgtacgccacatccaataatcaatattcatgatgacaaacatcgcgcatactccaagccctgcaaataagagctggcgtttagcaaagaaaaaagaatcattaaacttgtatgtagcccataccgcacttgcgctgtataccatgataaggccgatggttagcaaggaaagcgtaacgattatgagaaaaaaatctggggtagacctttttgtcgacactgtcacacacctctaaaaatagattagggctagtgtattttctaggtgtttagacaagcccttatttcagtttatgcacagattcaataaagatgtcaccacgttcttcaaaagttttaaattgatcccagcttgcacaagcaggagataataaaataacatcttcttcatctgaacaagcatatgcttctgaaactgcttgtttaacattatcgacacgttttacaatttgtattcccgcttcttttgctacgcgttcaattttaggagccgtttcaccaaacgtaatcacagctttcacatttttaaactcttcttttaaatcatcaaactcattgccgcgatcgagtccacctgcaagtaaaatcgtcggctgcgaaaaagcggaaagagctacttttgtagcaagcatattcgtagctttagagtcattataaaacttgcgtttgttgattgtcgtgacatattgaacgcggtgtttaacaccagcaaacgttgtgagcactcggtagatagcttcatttgaacaaccgtacagcttcacaacggatacagctgctaaaatgttttcttgattatgtttgcctggcagcaccacatcttttaaagacatcacttcttcatctttaaagaaaatggtttcgtttttaatatacgctccttctgtcgtttgagctgtaacagaaaaaggtacttttgtcgctttaacatctgcactagctttcatcactagctcatcatccgcattaataacggcaaagtcttcacttgtttgattgttaaagagatttgctttcgctttgatatattcctcttttgtgccatgatagtctaagtgggcatcaaacaaattcaataataaagagattttcggacggaatttttcaattcccatcagctgaaaagaagaaagctccgttacaattacattgtcctttgttgctttttgcgccacttcacaagctactgttccaatatttccagcaatcaacggctgcttttgatcttcttctaacattttataaattagcgttgttgttgttgtcttcccattgcttcccgtaattccgataaaaggagcttcgctaatttcataagccaattctacctctgttaaaatcggaatatttcgctttaatgcttcttgcaatagaacatttgaatacggaatcccagggttttttacaataacatccgctttgtctaaaagctcaagcggatgatgtccacacacaacttcaatgcccgttttttctaattcctgtgctgctgcgttctcttcgtacggtttttgatcattaacgactactttagcaccaagctgtttaactaactgagcggctgctaaaccgctcttggctaaccctaaaataagtacttgtttaccttgatacgtattgactgatttcatttaaatccacacctcgatataaattccaagcattgcaaataatagtcctacagcccaaaaagtcataactacgcgccattccgaccagccgcttagctcgtaatggtgatgaagcgggctcattttaaacacacgttttcctgttgttttgaaagatgcgacttgaataataacagatagtgtttcaataacaaacacaccaccgataataacaagcaagaattccattttcattaaaacagccaccgtagcgatagctcctcctagcgctaaagaacccgtatctcccataaatacttttgcaggatgggcattaaaaactaaaaaccctaacacagctcctactacagcaactgagaaaatagataattcaaactgctctgcattccaagcaagaactgcaaatgcaccaaaagcaatcgcacttgtaccagatacaagtccgtctaatccatccgtcaagttaaccgcgtttgaaaaaccaacaagccagatgatgaggaaaacaacataaaaccaacctaaatcgattgggtctttaattccaggaatcgtcacttcagttgaaaactcaaactgtcttgcaataaagtaaaaaataattgaaatgacaacctgacctaaaaacttttgtttagatgttaatccaaggttacgctttaacactacttttataaaatcatctaaaaatcctaataaaccaaatccgattgtgacaaataataatagaaacgtcttatatgtaagttctgcatactgattgaccataataagagttgccacaataatagataataaaatcatgataccgcccattgtaggtgtacctgattttttctggtgagatttcgggccttcatcacgaatactttgaccaaactttaatcttcttaagaagggaataaaaatcggcgacaatacaaccgtaatcaaaaaggctacgccgattgtcaataaaattgattgttctagcacgatgtcccctccttaacttccaactcattccgactcattttgttctctacccatttcattactactttcgctcctcaatcattttgcgtgctacttctcgatcgtcaaaatcgaatacttttttaccaataatttgataggtctcgtgcccttttccagcaatgacaataacatcatctgcatgcgctgtttccactgcatagcgaatagcttctgcacgatcagcaatcgtcacatagttatctgtatccaaaccttcttccatatcttttaaaatagccaatggatcttcacttcgtggattatcagatgtcaaaatagcttgtgtactgtattcagctgcaattcgagccatgattggtcgttttgtacgatctcgatctccgccacaaccaacaataacatatatattgcgttttgcgaattcttttacagtttttaacacgttctctaagctgtccggcgtatgggcataatcaacgataaccgtaaaatcttgctccgcatcaaccacttcaaaacgcccagacacgccttctaacacttttatttcctcgacaataactgacagagggatacctgatactaaacatgaagccgtagccgctaatacgttgtagacgctgaatttcccaataagcttcatctctacacgaaccgtttctgtcggtgttgttaagtcgaacgttgtgccgctgtttgtaatttgaatattggttgcacgaatatcactttcacggtcaataccataggtaatcactgtagcagccgtgtttttaatatattcctcggttgccgcatcatcagcattaagaacagcaaatttaggacgatcatggttataagcgtttcctaactgtgcaaacagcaaccctttagcacgacgataatcttccattgtatgatgatagtccaggtgatcttgcgttaagttactaaataccgcaacatcaaagtcgcacccgtgtacgcgtcctaagtcaagtgcatgagatgatacttccatcatcgctacttctacattctcctccaccatttggtgaaatgttttttggagcgtcagcgattcaggcgttgtgtttttcacatcataagacgtatcaccaatacgaatttcaatcgttccaattagacccgtctttttatgttgtgatttaaagatatgctcaattaaatgtgtaatcgttgtttttccatttgtgcctgttacaccaattaaatgcattttttgtgtgggctgattgtaaaaagcatccgctagcactgccattgctcgttttgtactcttcacacgtacaacaggcacttctacatccacaggcttttctgctaagattgctactgcccctttttccacagccatctgtgcaaagttatggccatcaaccgtatagccgtctatacaaatgaacaatgctcccggcttaacttctcttgaatccatttcaattgacgtaatatcaatattctgttcaggaagctgaacaaaatcatgtaaatgtgttagtagttctcgtaaatccattcctaccatgtcctctctatttgtaaagtgaaacgtttgttataagacgctatggcaactattcttctttttctagcacctaacctattacattttacagaaaaagaagcccggagggaacacccccaaggcttatttgttgatttcatgttcacacgcagagtaacctgctgattatcatgcaaggaagaataatggtttatagagatttttattttcccatataaattctaaccgtttcgccttctttaactttcgttccggctgcaggagactgcttgaccactttatctccttcgccactcacatctaattttaaattaagtagctgttcttgtaactctttttttgacattcctacgacatttggtacttttatcattggtgtgtccagccacgttaactctttttcaatttgtcctttacgcggtttaacgtccatcacacgcaagctgtcttcaatcattttacctacaatcggagctgctacaactccaccaaactgaatggtgccttttggattatcaaccgcaacatacacgacaatttcagggttatctgctggtgcaacaccgataaaagaaacgatgtgattattttttaaatactttccattttgagctttctgcgccgtacccgtctttcctccaacgcggtacccttccacaaaagctccttttccgcttccttgtgctactacactttcaagagcaaaacgcacttccttagacgtttcctcggaaataacttttcgcttagcaaccggcttatgactgcttacaacctttccggtagttggatccacccactctttggcaatataaggttcataaagcgttccaccgtttacggctgcggaaacagcagctacttgttgaataggcgtaacagcaaccccttgcccaaaagctgttgtagcttgttcaaccggccctacgcgctcaagtgggaacaaaattccttttgcttccccttgtaaatcaatacctgttttttgaccaaagccaaattctttaatgtatttgaacaatttttcttttcctaaacgttccccaagctccacaaaaccagggttacatgagttctgtacaacttctaaaaaagactgctgtccatgtccgccttttttccagcagcgaagtctcgctccgccaacttccgcggctccatcatcgtaaaattgatcttttagtaaatccactttcttttcttcaagagcagctgccagtgtaataatcttaaacgtcgatccgggctcatatacgctccagattggaagattgcgattatacacctcaggcttcacatttttaaaatccgtaggatcaaagcccggacgactagacatacctaaaatttcaccgtttttaggattcatggcaatggcaatcataccatctggattataagctgtctgagcattatccaactcacgctccatgatcgtttgcacacgtgaatcaatggtcaatctcaaatccagcccgtccacaggtgctgtgtagtcatcggctatattgggcatctttttacctttagcatccgaatacagtttaactgaacctttttgtccttttagctctttatcataatataattcaaggcctgttaacccttgattatctactcccgcaaagcctaatacatgcgacaaataacttccaaacggatagtaccgcttcgaatcctcagctatatatacgccttttaaatttaaatttcgcacttcatttgctttcgcatgtgaaatttttcttccttcaggacgcaaatacacgctagaagaagcttttgttatttgctcatatactttttcttttgatgctcccagcacttttgctaacttttcagctgtaacagctggattttcaacttgtcttggcataactaaaacggtcggtgcacttttatttgtagcaagtgccacatcattgcgatctagtatctttcctctttcaggttcaaaaggaatattccgactccataagtctttggctttttcagttagcgtatccccagtcagcaactgtacatatccaagccttgtatcaataatcaaaaacacaataaaaccgacaaacaaaacaatggctagccttttacgaactgtgactcctgatacccgcatatattagaacctcctctgaatcggctcgttccaatatatgcttgtacaggattcactagaacttaatttctagtcaagttgcttatcgtcttttttactatcagactcacttttttccgtttcttttaacttatttaacgtgcttgaaaattctttaggcgtttcaagttctactttcaggtacgttcctgcttttaacggatcgcctgctttaatactttgacttacaacataaccattttcaagtgcgctaggtcgaacgttgacaaattcactaaagcgtataacatcacgatgtgaaaaacctgttaaatcaggcattgtggcttttccatttgtcttaataaacacgcgttgaccagtgacaatggtatcagaagtcggtgattggctttctaccgtatctcctttacctattacaacaggaacaagtcctttttgttttaagtctttcacggcactatcaactgattcgttaacgtaagacttaagcgtaatttctgaatctacttttttatcttctgttttctttccgtcttcgtctgttttttcaggctccacccctaagtactgcaggctgtttttcatcaccggattaaatacggctgtaagcggcgcagtacccgtctcttgaggcgtgagagttggatttttaacggctacatagacaagcagctttggatctttagcaggtgcaaagcccataaaggaaatgaaatttttcccgtgtccatgcaagtagcctccggtaggaccaggaatttgagctgttcccgtctttccagcgacatcgtatccttcaatcgcgtaaggtttccctgttccgtcatcagaagaaacaacggtttctaaaatatctagcgtttcgttcgctgcttttttagaaataggttgtcctactacggtaggttttgttttcttaatcgttttcttatttgtttcatcgactacttgtttaatcacgtaaggcttcatcattttcccgtcatttgcaatcgcagtagccgcttgaatttcttgaataggcgtaaaagcggacgcctgtccaaatgcagtagttacgcggtctctcgggtacttcgtcactaacttgctagaagcttcgtttggcaagtcaattcccgttttatccataaagccaaacttgtccaagtatttatacaaacggtcggtgcccaatttttcgttggctaaaatggctaccgctacatttgaagacctttgaattccttcattaaatgtaatagctccccagccgactccgccgttgtgatcgttaattggaacgctgtttttcgttactttataagatcccgactgatagcggtcttcgccgttatagacgcctgcatcaatcgcggctgctagcgtaaagattttcatcgttgaaccaagttcatagctgttttcaacaaacggattacggtaagaagtgatatcacgaatattcgggtcaaatgaaggacggtttgacatcgccaaaatttcaccggttttcggattcactaccgttgccattagctcttctggtttatattctttagcagcagctgtcattgcatcctctaaaaacgtttgaattttttcatcaatcgtaagcgtgacgctgtctccatttttcggagctacaattgactcttttggatccggaagcttaattccatttttagcagcttcgtattttacatatccatcttcttcagaaagctgcttatcaaatactttttcaattcccattttccctacgattttacccgtatcatctttttgtgcgtaccctaaaatacttgaggcgaatacaccgtttggatagaagcgcttcgaatcgcgtaaaaacgtgatgcctgggagatttagtttttcaattttttgctttagcacgttatcaatgtcacggcctccgggaccaagttcgacttggaatgctccccttttaattcctcttgttaacatgctgtcaatttttgattcgtccatctttaataatggggctaatttttcagccgtcttttctgggtctaccacgtgctgtggatgatctttatcttctgattgcgattccttcaaaatcgccacaaccgtataagcacctgtgtcttgggcgattgcttctccgtttcgatcgtaaatcgtaccgcgctgtccttcaattttagacgttcgcgtatgctgtttttgtgcaatttcggctaaagcttctccgtctgctttgcccgtcgcttggatgtaaaagaacctgatggctaatacaaaaaagagcaatgcaaatattaaaattaatattgctgctcctgtactaatattgctattttttcttggcgtagtcatcgcaattaatcgttaacgacttttacgttattttcattcaattttagtccaagttcttttgcttttgtccaaatacgatcgtatgcacttaactctgttacctgtaattttaactcattgttttttgcttcttgcttgtcaatctttccatcgagtgattgcacttcttcactgatgctataaagcgaagattgatttgaaatgatttgcacagacccaaacagcatgagtgcgacaaatccagaatacacaattttttcaccaaccgtgatttttctttttgtcttccgaacaacttgacgtaccgtcttttgctgcttctgctgctgatcttgctctcttactttgtatgctacattgttcattctcgtcccctcctctttgataaaaccctttaattacactaatttctcaacaattcgaagctttgccgaacgcgcgcgcttattttcttctatctcttcttctgaaggtaaaataggttttcttgtaataactttcattttaggtttaaattcttctggaataatcggcagtccatgcggaagctgcggaaccgtgcttgcatttttaaacgccactttacaaattcgatcttcaagtgagtggaaggtaataacacttacacgtccaccttttttgatcacatccatagcctgttcaattgcatcttcaaatacttggagctcatcatttacagcaattcgaatagcctggaaaattcgttttgcgggatgtccacccgttcgtctagctggcgctggaataccatctttaataagatcaacaagctctagcgttgtttcaattggtttagactctcgatatgcttcaattttgcgggcaatttgttttgaaaacttttcttctccgtattggaaaaagattttcacaagtttttcataaggccattcatttactacgttgtacgcagaaaacattgagttttgatccatgcgcatatcaagcggggcatcatgatgaaagctgaaccctcgctctggtgtatccaactgaggagacgagactccgaggtcaaacaatactccgtctacttcttcaattccgtgttccattagctgctcttttaaatagcgaaaattacttttgattagaataactctgtctagatacggggccaatttctcttttgcatttgcaagagcgacatcgtcttgatcaaacgcaattaatttccctttttctgatagctgttttacgatatattcactatgacctgctccgccaagcgtgcagtcgacatatactccatccggcttaatatttaagccttccgctgcttctttaagcaaaacagttgtgtgattaaacattatgacacctacttctttctaaactacttagttatgtatacaaaaagcaaaaaacggtgtttttctttgatatatatacacgtttatattatatatcaaagttcaacattatttcagctatttatataagaattaagtagaattttgtctttttgtcacaaatagtgtcattttgttaaaagtaggacatattcgtagaataaaatgtaaggaatataaggtttttttacacaattagaaataaataccttataaggattcaattggttaacattcaccttgtagactttttctcttttccaaaataaaaatcctgcttttcagcaggattttattagacataacagacttttaactggtgatttaattcgacttcagcacttagtaaatctgacacaaattgcataccataaccatttaaataatacataatattccacatgcgttcttgtggagcattgtagggacgaagagcaagttcaatttgagcatattttgaatgcttcacatcgtgcttaattagctgtttggattcgacaatcttttgaatggtttcaaactgcttttgaataatcgctcgatttttaagcatgacttcatcaaatgttttgtcttctttttgaatattttcacgaagagttttatgaattttttcgaaatcttctttcgctttttcaaaatacatttcgtatgggttgtgaacttctgtcttaagccagtgctctctctctgcatctacaccttcgttcactacgttcgaaaggtctaactgaagttcatccatatacttctcgatatgtctttctacgattgcataggataacctagggaccacgggaggcattttaaagctaaataaagaaaatgctttttcaagctctgcccaatacgctacttcccccggacctgcaataaatgcaagggtaggaagtaagtactcctgcataaggggtctagtcacaacgttgttactaagaagctcaggcgtttgtttagcaatttgaaccagctcttctttagacagcgcgagttcattttgctttccaacaaactgctcttgttctgcatctctttctaaaagtactctgttttcattgtgtgaataaaagagatgagccgtttcttctcccacttcaatcattcgtccatattgtttttgaatctctgtttgctgttccataacggctgacgataatttgtcattttgttcaattaacgtcacaaagaaagaagattcaatgctgcgcacttctttagaagctgcatccattaaaataagacctgactctgcgaacattgtggtaaccaaatgagcaaagaaatcgacataggtacgtgatttatctaacgcttctaaaacaaagtgtaatacctggtttgtatgcgccgtttcgttaaacgtttgaaatacatcacgaacccagcttctacaggcctcatggtctagttcaatttgagaaaccatttgctttttctttaaagaatgctttagcgttttctttaaaagctggtttttatgctctgtgtatacatggttgatctcagcaaaatcatgatcttctccagcaatccaaaataccggaagcacgggcacgtttaaagcttcctcttgttgtttagctaggagcacaattgaaatcactttatgaatggtgtacaaaggaccggtaagcagccccgcttgctgacctccaacgaccactacgctgttaggatcttttagcttttcaatattttcaatcgtcttagaagatgctccgtagcgcttattaaaatcaagcagatactcagcaagctgttctcttggataagactgcttttgaacatccgctaaacgtttttcatatacgtctttttcgtgtatattataatgaaaaaaggaaagtgcttgcttttcaccttttatgtaatcgttcgttagtttgtttcccgcctttaaagagacgtctgtaatctccatgaaagaacttcctttcttttcctaatacttatattctctacatatagcttcattatccataatgtaactgcccacgtctagtaacatgctttacagagaggaaatacgaaaagcgattccacctatatttaatacaatatgtgcaataagaaacaaaacaaaattcatccgaaagaaccctttcgcgataagcttcatttctaagtcatgtttgactttccaatgtacaaacatcataatcattgctacaactaaaaggactaacgcaatcaaccacaaaaaagagtgcccgaaaatttccacagctgcataatgcacggaaaaaataagaaaaaccgtagtaacgtacgttgctatgtggacagatttccttttatttttcgtcagtttgcgtaaaagcatgtatagaataaaaaaaccaacgagcggcagagtgacaaacgtcgcaaaaactccagcaataaaacttcccatgttaatcacccttttcttcttcgattccttttattgacccatataaaaagtcaacaataggcgtcgacgttcttttttcagcagcttgtgtttgaatatagcctaaaatagcatcaatttctgtttgccgcccctcctgtatatcttttagcatagaagattgatttgtactcgtgcgcgaacaaacccccagcgcattttcccaataattaaaagctgaatccagttttaacacagccgcaatctcttcaaacaatagacgcatcgttttataaaaatagctgttgtgaatcagctgcccattttttacccgatacagcgccgtaagaggattgataagcgcatttacaactaatttcttcaccagcatcccataccaatctgtttcaatcacccaaggaaaattcacaattggcaagatagactccatttctcctctgtacgaagcaatacgggttgttcctattcctgtatgatggacgctatccatatctgtacgcattgccccgtgttcaactgtacccaaatagagagtgctctgggggagatttttaagaatttcaatatggctcataccgttttggataaacaaaaggggagtatgtatagtaagggttttgataaaaggaataatctcttttaaatgatactgttttacagtaacaatgattaaatctgcttcttttatgtttttttctagagggatagcactgacttttttagtgtgatgttccccttgtctatgtaaggtaattccattttcgttaatacactttgcttgagtttttgttttcgtatacaaggttacatcataccaatctgataaatacgcgctaaacaacagacctaatgatccgcctccaataatacctatagttttcatcgtattttttgttcctctttctattattgagtttcattttagcaaaaaaatgctttgaattaaatgcattcttaaaattttacctattcatatagcccgtgtgattaaaaatcaccgggcttgttataaattatttagagtgatcccgtttttttctattatacgggatacaccggatgtttacgacggctaaaggtcacattctttgtttcatataatcgaaagcggtcaattaaagttcgacgcagttcgttagcaggaacgatgtcgtcaataataagttcagaagccagcgtatagatatcaatgtgttctttatactcctgctgtttctgtttaacaaacataaaccgctctttcggatcttcaatttcattaattttattagaatagacggcatttactgccgcttcaggacccattacggcaatttgagcagtaggtaatgcaaggcagcaatccggttcaaaagctggaccagccatagcgtaaagccctgcgccataagctttgcgcataactacggaaattttaggaactgtagctgaactcatcgctgcaatcaattttgctccatgtctaatgatgcctgctctttctactttggttccaatcataaatccaggtacatccgctaaaaatagcaaaggaatatggaaggcatcacacagttgaataaattttgcgcctttatctgctgaatctacaaacagcactcctcctttgaccttcggctgattggcaataatccctactacttttccatctattcgtgcaagccctgttaccaattcggcggcaaacagttttttcacttcaaagaagctcccttcgtcaataagggtatcaattgcttcatagatatcaaatggaacattttgattctctggaattagttctactaaatcctttgtctgcttaggctctttagctttttgtactttaggcttctcttgatagttttgtggaaagtaggttaaataagatttggcatacgaaatagcttcttcttcagaataagctaacacatctccacatccgctaacgctgcagtgcatatgtgctcctcccatttcctctagcgtaaccttttctccaataacagcttcggccatacgcggcgaacctaagtacatagaagcgtttccatctaccatcacaacaatatcacaaaatgcagggatatatgctcctccagctgctgacggaccgaagagcaaacaaatttgaggaatgacgccggaaagttttacttgattgtgaaagatccgtccagcgcctcgacggtttggaaacatatctaattgatccgtaatacgtgctcctgcagaatccactaggtacagcaaaggcacatgcagtttttctgctacttcttgaatacgaataattttctctactgttctggccccccaagaccctgcttttacagtagagtcattagccattacacaaactgtttcaccgtttacttttccaattgcggttacaacaccgtctgccggcaacccttcggctttattatttgcaaacatgccgtcttcttcatatttcccgtcatcaaataaaagcgctaaacgatctcttacaaaaagcttctgttgtgttgcaagtttctctttgtacttctccgcgttgccacgctctactttttgacgattttcatcatattttttctgagattcacctgtatgtatcatgatatctctcctttatgagttatgaaatagtcaccaaaacgtcgccttcgttcacaaaatcccccacggctatatggacagtctctgcaataccagcttgatcgctttcaataggaatttccattttcatagattctaatacaacaacaacttctcctttggctacacttgcaccttgctgaacaaacacattaaataccatgcctgccattgtcgctttgatttcactcattgtggtgctcctcctttatttaatacggttgataataacgatgtgttatatgtgcctttttcatataactcttcatttaacaactgcttaaatagaggaatattcgttttgattccctctacaacagcttccgtaaaatatgatttagctagttcaattgcatttgaacgcgtacgaccagtaatgataacttttgcaatcattggatcataaaaaggtgtaaccgcattcatatcactgtagccactgtctacgcgcgcataggttcgctccggcaagtgataacccgtaatttttcccggagccggtaaaaaagtaaacggatcttctgcataaattcgaaattcaatggcatagttatttgctgctatttcctcttgcagacgaggaagcttttctccgcgcgcagctaagatctgccacttaactaaatcgacccctgcaatttgctcggtgatcggatgctcaacttgcagccgcgtgttcatttcaagaaaataaaaattttcgtcttcatccacgataaactccaccgtacctgcattataatatccgattgctttagccgcttgaacggcttggttttgcatggcttgtcgcgtactttcttttaaagaaagcgcaggggcttcttcaatcactttctgatttcttctttgtacggaacaatcgcgttcaaaaagatgaacgacattaccatgctgatctccaaacacctgtacttcgatatgttttgcgtttgtgataagcttttcaataaacattccttcttgaccaaaatatgcttttgctcttgcttttgttgaggcatacacttgttttactgcttcttcgttatcgcagcgcaccatcccaattcctccgccgcctccgcttgcttttaacataacgggatatccaattagactcgctactttacaagcctcttcaactgacgtcacatcgccttcgctgccggggacaacaggtacacccgcttctttcatcgcggcacgagcagcaattttgtcgcccatcatcgaaatgatttcgggagaaggaccgataaaacaaaaaccttcatcaatcgctcttttagcaaatgcactattttccgataaaaatccatacccaggatgaatggcatctactttttcttcatgactaattcgcagcaattcttctacattcaaatatgacttttgcacagggggctctccaattcgacgtgcttttgtagctgcttgaacataaggaagccctacatctgcatcggaatagacagccaccgtttcaatgcccatttgtttgcatgtatgaataatacgaagagcaatttctcctcgatttgcaatcagtatttttttcacctttctctcccctttcctcaaatttctactttcccccatataattctacaataattttaaaactcctctacaatttttgaaaacgctttctatttgaatctcactttccttttgcttcctttctaaaaagtgatgcttatagtaatgtattcttcgtatttaactgaaagaattcatttttcctcatgtgcattgaatattcgttcaccaatcatgaaaacagaatattttgtgtttttgttatataatattagatgaacgaaccaagccagttcgtttgtctagcaaggagacataacaagggggatatgggatgaattacgaagtgaagcatttaaaaattaattttaaaacgctagaagagttcaagaaattcaaagaatatggcattcaagaactttcaatgctagaagaattacatgccaaaatttccgataatgaaataaattctccgttttacggtatttattttggaaatagcttagtggctcggatgagtctctataagcgaaacaaacagtacgatcaatatttcgagccgcctcaaacgtatattgaagtgtggaaactcgaagtgctcagcgattttcagcgcaaaggattgggtcaaacgctcgttgaatacgccaaatcctttcaattacctatcaaaacaagcccacgagtaaaatcgagtgatttttggtcaaaaatggggttcgtacctgtaacgtatgatatcgatcgtgatttgggagaaaaccctcttatttggctaccaaacggtgtaagcgaacaaaaataaacagctgatttccagctgtttattttatatctatgtggtatatatgatcaacatgaagtagggagcattcaaactgtcgctttacttttgaactttttctaaatttaaatttttatccacttgaaatttcacttttctacttttttcatcctcttttaatacaaccattttacgagccctctccataatttcaataagagctttatagtcatcttctacaattaacaagttgttttgcaaagcttttttttctttttccaaaatcgttactttctcttgtaaacgttcaatcttttgctgcagttcttcattagcttcgagaagctctgacgagtgcctttgcccttgatctacattttctaaatatttaattacctcattaagcgaaatatgtttctctgcttccatatatgataagcgtgcaggctgctcgtcatcttttgaaacagttcttgcttttaattcttttctctgttttttcgcaagatcaataccagtcttgtattgtttgcgcacaaaagaattccagcggaagccacaagctgctgatgttcgtgtaagtttcttccccacttcttcaaatgcagctagctgagtgccaccttcacgtatatgacgcagtacaatttctgcgagtaataaatcttcatcatgagtccatgcatcttgacgagaagaagtcatttttctatccctccttatccgtacttattaaatgaatatgcacctactagataagatagactattgttcctcttctcaatcaagaaaatctttcatatactttgaagcaaaatgggaaacccgtgattctttcatctttcgcttattcactatattgctatggaaatgcagttcataactatgtttttttaacgatgaccttttgaaccgcttcttcatgctcaggcgactcccacaatatcgaacagcgatgaatttcttgttccatccgattccaaacccggctttgctcccatttctcaatagcgatttctttgtaagcttgcaatacctgggtcggtttatgagtgataggcgctaaccactcctcacacctcatagttagctctttaaacgacgtgacataggaaagaaatccaatttgctttgctcgttctactccatacagctgagcactgtagatcatttccatcgcctcttgataacgcagcttttcaagaagaatggttcctcctccccagcctgttgtaattcctaaattcccttgaataaagcccatttcgctatgtgttgcacttatacggaagtcacatgcaatcgcaagctcacatcctcctccaaccgatgttccattcaaaagagcaactgttggttttgggagtgttaaaatctcataaagaatttcccccattttcgttaacatttgagacgcctctttcgaagtctttagctcatgaaatacgcttaaatctcctccgctgcaaaatgcgtctgaaccagcacctgtaattacaaaagcttttactaactgatcatgtttcacataatctacagcttgctgcagttcattcataacatcataatcaatagcattacgcttttcaggacgattaatcacaaacgtagcaatgccttggcttgtagtaaacagctcgctttttttcatgctttttcctccttatagaaaagatataaatccttttacaacagtaattgtttatttaaaaagagttcttgttctataaaaaaaatccttctcttccaaaggacagagaaggaaaaaaggcaaaaaaaataaaagacccttaagagggtcttttatttaaataagcaattatttgcttactacgtcatttcctttgtaagtaccacaagctttacatacgcggtgtgatagtttcatttcaccacaatttgggcactctaccataccaggaacttgtaatttaaagtgcgtacgacgcgttcttttcttcattttagatgttcttctaaaaggtacagccattattcccacctccttaaaagaattttaaaatcatatgaaggcccgaaagccggatcttcgcatttttatttctttttgtctttaaagaaattttcgagtacggctaagcggggatctactttttcctgcttttcttcttcggtaacaacttcccagtcttttcctgactgtggagctgctcctgccgcttgctgattttcactaaatacctgcagaggaatttcaacaataattaactcttgaatcaaaggttgtaactcaaccgtttctccctctacaatgcgtacttcagcatcttcttcataatcagcattcacattcaataaaaacgtttcagttgcgttaatttcaaacggatacggaacgtcaactaatgtacgagcacaaggcaacgtcatttttcctgaaattttaaggtgaaacgttactttcgaagaactaatgtcggctcttcctttcacgtttacatctgacattctacgaatttgaggatcagcattcataaactctttgccgtcaatcacttcgtcaaatgttagacctttattttgcaactgatacaattgatgtattgtccatttcattgttaatcacctcaaggcaacaaaggttattatagctttcacaagattatttgtcaatattttttctttacactataatgtacttaaatatgcttttttgtaaaaatttcttactttcataaaaaaatgtttttaaaacaaagagctagactaaaaataataaattaaaaggagacattatgcaagcagttggaataattgtcgaatataatccttttcataacggacacgcttatcatttgcaacaagcgaaacaacaaaccggagcagattgtgtgattgctgtgatgagcgggcactttttgcagcgcggagagcctgctcttgtatcaaaatggtcccgcacaagaatggctttagccgctggtgcagacttagtcgttgaattaccctatgctttttctactcagaaagctgaaacattcgcaagcggcgctatttctattttagaatcccttcgcgctgactttatatgctttggcagcgaaaatggcaatattgactcatttacccgcaccgctgatttgctcgaagctcatgaatcagaactatccgctttaattcaacaagagatgaaaaaagggaacagttatccaaaagcagcttccaatgctttcttacagcttttcacgaaggctcctattgatctatctcagccaaataatgtgcttggaatgagctatgtagctgccatcaaaaaacagcatgcatctattaaaccatatacaatcactcgaattcaatcacattatcacgatgattccctgtcttcctcttttatttcaagtgctacaagcatacgtaaagctatttttgacagcagcagccatggggacctgagcaagcacatgccagttagtacggcaaatgaattaacagcttacaagcaagcacacggacagtttcatcattgggagcattatttcccatttttgaaatacaaattattaactactccactttatgacttacagcgtatttatgaaatagaagaaggtattgaacatcggctcctatcttatatttcttcagctacttcatttgaagattttttaacaaatgttaaaacgaagcgatatacgagaacccgtttacagcgcatgtgcgttcaccttttaaccaatacaacaaaaagtgagatgcaacaagctgatccttatattcgcttattgggaatgtctaagacaggacaaggctatttaaaaacgagtaagaaaaagctgtcccttcctattgtatccactgtatcgcaatgtaaactaaaagaaattgataccgatattaaagcgacacatgtttatagtatgccgtttcaagagcctctgcgctctcaatttatgaaacaagaatacacgcagcctcctatcatttggccataaaaaaatcgtctgcaagagacgattttttatggtttcagcttttccaaatacgttacggcgtccgaaaatgaatctacgggtacaattttcatatcactgtctatttttttagctgtcttcactgcttctcggtagttagagcccgcagcccctttttcatttggtgcaaagaaaatctctgctccttctttatctgcggctacaattttttgcgaaatacctccgattggtcctacctctcctttatcattgatagtccctgtacctgcaacgagatggccttttgtcatgtcctctttaacaagctgattataaatttcaagcgagaacatcagtccagctgaaggccctcctattttttcagtatcaatatgtatatcgggcttaacttttagttcttggttcgtttctaaggcaattcctaggcctactcgtttcggctcgtcagggaatgctttaacttttagagtatgtttgctttctttgccatctctttttacataaattgatactgaatctcctgcttttttagtcgatacgtagttgattaagtcctcagcagtttgaattttttccccgtctactttcgtcactacgtctccaacatgaagttttccatgtgcaggcatattttctacgacatatgtaacatatacgcctttattgagataggaaacgctctttccagctgcttcgtatgctactgaaatagcagcattttttgacgtatccatcatatgtaattgccttgtcgagtaatcttcatcgctttcaccttgctgcaaaatttgctttgtagggaaaatttcatgaaagtcctgtattttcgcaagaccatatgaaagaggagttgctctgcccattcttacagttgtcagcataaacgtccctttttcatggtatccatcttctaccttaataataggagcaagttcttctgccattccaggctttgtaatgtagtacggcaaaggataaaaacaaagcattgccaccactgcaataacagccaaatataccaaaattctaattctagatttcactttttttgttctccttccaatgatcaattgcttgcaggatagaaggcaactgctcatgtgctgcttgttcaccaattgaaatcatttcttgaatgtttgtaaacgctctggaactaaaagtatcgagattaggacgaatcataatgtctgaagcaatggtccgatgagctactagctcatcttgcaaaatatctaaactttgcataatgacatcaaaaatagagctgatttctgcattcactttcgcttttgatacatcgactccaatgacaatatcagatcccatttcttttacaaccgatacaggaatacggtccactaccccgccgtctacaagcaatcgtccatcaattacttcgggagcaaagattcctggaattgaaatacttgctctcaccgcttcagcgataggtccttttttaaacaccactttctctcctgttttcaaatctgtcgctacaatggcaaacggtacagatagctgttcaatggttctattttgcgtaaaggtgcgaaccaacgattttactctgtttcccgtaataaatcccattttaggcacggtaaaatccaaataatactttcgtttgaacgttagcgccattttataaagagttgccagttcaatacctgacgcatatagtgcaccaactaaagctcccatactgctgccagctagaaaatcaataggaatgttattttctgttagcgttttgattactcctaaatgtgcaaaacctctagctccacctgagcctaacgcaactcctatttttgggctttccactttacctgccccctcgttttaccttatagacttctaaaaatgtaaaaacatttgatgagcttctctatcattgttgccctgtattcggtaggactattcttcattttctatttgttcatttagtatgaagctaaagatatgttttgctcaatacacggtggttattaagcattatactatactgaaggttgttttaagaaattcttactcttcgcttgctgcatatacgtttttttactccttgactatcctaggagtgcattgatttatgtatatgaattgtatttccaaatgtgacaagacgcctttttattcaatatgaatttattttctccttactcataggcataaagtcgatgcatagcttcgtatattgatatatagaagaacttgtacattcgcctaaaactcctcatttcattcatatcaagatgacgtgagcttagaaaaggagatgaatcgttcgttgaataaatcaatggtgaaaacacttctgctcgggacgagcgtaacgcttctcgctattgcgcttattgtatatccaaaagaagcgctagaaggttcagtaagaggtctcaacacatggtggaaggtcgtctttccttctctgctgcccttttttattgtttcagaaatgcttattgggtttggcgtagtgaagttcattgggatcttattagagccgtttatgaggcctttattccgagtacctggagtagggggttttgctttagcaatgggcatggcttctgggtttccttcaggtgcaaaaatcacttcccggctgcgtcaagaaaagcagctaacagctatcgaagctgaaagactcgtatcatttactaactcatctaaccctatttttatttttggagctgtggcagttggctttttccacaatccagctgtcggtatcatattagctctctcacattacatagggaatatttgtgtaggattggtgatgcggttttatggatcagcaaaaccgaaaggacaagtaactcaaaaaccttctttatcgttagcttttcatgaaatgcataaaacgcgtttaaaagataagcgtcctatcgggaagcttctaggagatgcggttacttctgctgttcaatctctcttaatgattggcggttttatcattttattttctgtattaaacaaacttttatatgttactcatatcacggccgttttaagcagcggtctagcttatttattttccctgtgtcatatagggcctgaactgagccttccctttatttcagggctttttgaaatcacactaggaagccgtctagcaagtgaagcaccagacacgctgctgtttcatcaaattatcatcgttagttttgtattaggcttcagcggtttctccgttcaagcacaagtggctagcatactcgccgaaacagatattcgatttttcccgttttttattgcacgcatttttcacggctgttttgcggtagtattcactatctttctatggggtcctcttcgagaatccattactacttttcaagcatctgaaggagcactgccggttttttctcacttggagtccgttacgattctatcgcagtggctaaacgtgtacggtccgctcttaacgatttttacgctgtgctgctatatttatatatattcaaaacgaacgtttcttcatcgttcccagtaaaaaaagaacgcgacgttttcttatcggcaaagaaaacgtcacgttcttttttatcttatttttgagacagctgttcaaatttttccgcaagcgcttctctaacagggggaggaactaattcagaaatattccccccatatttagctacttcttttacaatactagaacttaaaaacgagtattgattatttgtcatcataaataacgtttcgatttctttatctaatacgcgatttacagatgtaatttgcatttcgtactcaaaatccgatactgcacgtaaacctcttaaaatggtctttgcctgcttttcttttgcatattccattaataatccgctgtacgactctactaccacattaggaagtgattttgttacttctttcagcaaagctactcgctcttcccctgtaaatagaggactttttgaagaattatttaaaacaaccacataaatcgtatcaaatacatttgcgcctcgtttaataatatcaaaatgtccatttgtaactggatcaaagcttcctggacaaacagctatactgcccatacgtatcccctttctacatctaacagctcattgatttagtcaactgattcttcttttttgtatgtataaatagaaacaccaatgataccgtacgtttcgctttttattttttcaaataaaccaatctcatcatctaactgtacatcatgagaatgctccgctacaataattcctgtttttgctagaagattttcttcacttaccgtttcgataagcgctttcaacttttgtgctttatacggtggatcaagcaaaagtaaatcgacagtcagctcccttttctttatcgctttcagtgcacgttctgcatcatttcgatacacttcagcgcggtcttctaaccggcaagatgctaagtttgctttaatcgtctgaatcgctttgccatcccgatccacaaaaatgactttatctattcctcggcttagagcttcaattcccaagccaccgcttccaccgaacaaatcaagagctgttccaccttcaaaaaacggtccaatcatattaaaaatagcttctttcaccttatctgttgtagggcgggttgagtatcctggaaccgcctttaacgcatggcctttatataaacctgctactactctcatccttatcactaccttacttttacttccttattcttcattatcctaacatattttgaattacaaagactagcaaaaatcctcaatttattcaatgctgtatacattctatgcagtaaccagcagcttgcttttatgctggacttttacggccgtgtccttagatacactgattcttttctaaaagatacacctatgaagatcattcggcatttcgttcatagaagaattcctttactttaatatgtcataacaaacgtaaatttaccctttttctctgttatgttatcagtcttttatgtattaaaaagtgaatttcacaagacaggtatatgaacgtttaaaacggacatactgactagtaacaacatcatctaaccgatgttgttgccaaccgcggagaagacttacgtttccccataagttcttcctccggtttctcctctccctttgccttcatcaaggtgcttgtaatcgcagaggtgattacacccctttattgaagggccctacaatgagtagttgtagggatttttttatttactcttaaaatattcagtgatacattaaactacgtgagtttgcttttttaatacataaagggggaaatacatatgattcagcgttttattgagctcggagaagggtattcagatatttatgagctgttagagattgtcaaaagcaacaaacaccgtcttgctcatcttattatgctgcgaacaggaaaagaagatcgacaagtagcttcttttgtcgctgtcttgcatccaacagctgaagggaatttccaaccgctttacgtttgccgagaaggaattgttttaaaacaaaacgacagcaagcgcgttgagttatttaaacgagctgctgaggaagcgggaaaagaaattgtggtactcgatgtcaaaccatctactacatttccagaaacagcactctactatcagcaccttattggcattttgcgaatgaaccgctttattccgccaatgcaataatctcatccctgcctattcgtttacgaagggcaagtaaaataaaaaaaaggaatgtaaataacattccttttttgtttaaattcctatcttatagtcatattccttcgccttatccggctttgaattttcgaattctgtttttaaaaacggccgataagaaggatctactttcttcacaaaaggtagagactgaagtttatggattgttttttcaatgccatcttggttgcaatataagacaacatactttaattctttagatacgtaatgtacatttccgtactttcgcaatgcttttgcttgcttaacagaatgcacatacgccacaattccttgacgttcaacaaacatatttagttccccttttgcatacgttatattggttttctttatcataaattcttttatatgaagtaggtgctttatgtatgaatttagatgatatctggatgctctttcttactcattttaacgagcagagagctattgaacaagtcattttcaaaaaaatcacaaatataccctttttgtatataaacacatcaattaagcgtagaaaaatagatgagcttctagaagcttcatctatttttgctacatccaatacaaatgctacgtggcgctcaacttttgtcagaagtcagcatcttacttatgtttatcagcataggttttacgttccacagcgtaaaatggcctgctgcggaaattcctgtgctgattgcgttcgatttatacagtgaacggcttatgcgctgcacccacagcttcccccagatccgcagccaccgccgcagctgcttcccgtatcaaaaaacggatttcccgttggtactttcacatgctctgaaacagcttgaccaaggataacgctaatttcatcaagcagcttttgtaattcactttctgcttttttgaacgcagcgattgtcgcgtgtaaatcaacttgacgctttacatcacgcacttgtctcgtaatggttttataatcaggatgatattttccaaatcgctgaacatcctcatactgttcctttattttcacaaattcagcaattaatgcctgtgcatgtgaatctttatttaatctatataaacattgacgatagttctcggctacgtctgattgtaacaccatgttcgctacgtgatcagactcatcgagtaattcaacagttctcattgttgtcagcatggctgtgcacctccgtttttatcttatcacgttttggatctaaagaaaaagaacttgctaaaacagcttacactgatttactacaagttctactttttaactatataatttcaaccgtaaaggtattcctcacttgataactttcttctttagatttcatcagttcaatcgtaacagtatgagatccttttggaagatcacttaaaacaaaggctgcttgcttcatttctttagatggttttccatctactttgatttgaaggaatccactctctgttgaaaatgaaaacccgcttagaatacattcgacgtatacgttttgtcctttcacatgctggtgtaccatcagtgaaggttttgtattcattgcaccaaacgtttcagctgcccgcggctgagaggaaattttagtttcaggttttggtttatcatggttgcatcctagcagagaaactacacataagaccgtcgttaatagtaagcgcataataccattcctttatcattcgtttctccatagtgtttacaaactctttgtttttactcatgacgtgcaaaaatctctgcatcgctatgtatgcagagatcattgatttttcatggactgaaacatatgaaacatcatgtttgccatttgaatcgaattcgaaaacttttcgactttatgaggaatcgtttgtttgtagtagtgcttagattctaattcaaatttctccagttcttcaggatttctagataaacgccggtaccacattggctgttcacgaacgaagtcgttgagtttaggacgagactgcatatactcgtatatatcttttctcattgcgtttaatctttcctaaagccaaatggattccctggcccggaagctgctcctccaccggatggcttagatggctgaaattgctgcagtacttgttgaatattggaaatagctgaatttacatttgtgatatgattttgcatttgattcaagtccatgtttttcagcgaggatacgattgtacccatgatatcttttttctcctctgttgcagcagttggttcagcctttgcactttcttctgaacgatatgcctcccacattggatcttctgcaccgaataaataccaatcttcataaagctctttccacgttttttgctgctttcgaacctgttctactaatttgggatgtgattttacaaattgtttaaattccacaacggacggatgaagctctcgtttggtttccttcacagtcactcacctcatacttaaatatagcctactatatcttagaaaaagagagctcgtttcgtgcgcctatttcaaaaattttttatagctgttttttcgaagaagcacgaactgtgaaccagtatgtaatgaaaatagataaaatgcttagccaaaatgtaaaataaccaatttcagacatatacgcattgagcatgctgtatcttggcatcatagaaaaaacgtaatcaatgatatcattatgtacagcccatacagcggcaacagctacatgccataatttaatgcggtaaaacggtacgtacaaaagcccttgaaaagccattgctgcatgagaagccattaacataagcatcatccaatcaatgtatcctgttaacacatagaccaatacattcattacgacggcccaaatcccgtatttaaacagcgtgatcatggctaaagcttcaaacagtgaaaaatgctttccaagtaaaagaccgataagtacaataacaaaaaacaagcttgccgttggactatcaggcacaaatattaaaaacttcttaggtgtttccgctaattgacttccataccaaatatatccgtagattgttcctagtatattcacaatcagcaaaagcgttaaaaaacgcttatcttttaaggtataccataaccaagccatttagaaagtctcctttacatttaatctcttctttattatgtacagtttttgaacaatagcaagcacctatctcattgatgtaaaacacagcattaaataaattcaaaaaaaccagccctttggctggttttcattattcttttcctaagttgccgacaaactccgagagcgttttcaattctttatctgaacctttgaaaacaccttttggcatattgcctctaccattttttgcgatcttggcgatttcttcaggagataaatcaattcctgttaaagccggagccgcaggacctccctgtaagttatcaccatgacaggttaagcacgtttgcttttgcatgattttgtagccttctgaatttttgtcaatcgctacttcttctctaattttcccttgctcttcacgcgctttccagtccacctgtgtcgctgactgccacgttaggaaatagactgctgctatagccaaaagcatgaatcctgttgcaaacggcctcttagctggtcttctttctggtcctcgatcaatgaacggagcaagcattaatgcgccaaatgcaatccctggaataataaatgcacctataatattatatggaccagaagcaaatgaatatttaagcaattgatataggaacaaaaaataccagtcaggaagaggcaagtaccccgtatcagtcggatcggcaatacgttcaagaggagatggatgagcgatggttaaacatagataaccgattaaaaaaactgcccctaccatccattcttttagtaaaaagtttggccagaatgcttctgttttccctggaaattcagagtaatcttttggaatattgggttttcgttctgcaggaacacgtgaatctccaacaaacttcatccctttaccacgatgcatgttctccctcctttttctcactgttctagtgaaagtactaacaacggagtatgtgcttgatgcatatgatgactagtgtgattgaatacttgaataaagtgtataaaattttatagtggtcctgaaattccttgtttacgaatcattaagaagtgggcacccattaagccaagtagagctccgggtaaaaagaatacgtgaatggcgaaaaagcgagttagtgtttgagcaccaacgatgtctggatgtcctgagagtaatgtcttcacttgctggcctataattggtgtggattcagcaatttgcaaacctactttcgttgcaaatagcgctttcatatcccacggcaacaaataacctgtaaaacctaaacctaacataacaaagaaaattaacacacccacaatccagtttaactcgcggggttttttgtatgctccttggaagaaaacacgcagtgtatgtaaaaacatcatgacgataaccaaacttgctccccagtgatgcatacctcgaacaatttgtccgaaagcgacttcattttgcagataataaacggattcccatgcattttttatatctggtacataatacatggttaaaaacatgcctgataaaatttgaataacggtaacaaaaaacgttaatccaccaaaacaatacacaaatgctgaaaagtgatgtgcaggatttacgtgctctggcacttcatgatcggccacatctcgccataaaggagtaatatctagccgttcatccacccagtcatagattttattcaacattttctatgcccctccttgtggtttggcttttcctagatataacgtaccgccttttactttttgaacgtatacatctaacggtcccatcggtggtgtccccggtacatttttaccgcttttttcatacattcccccatgacaagggcagtagaaacggtgtggatagtttttgtcaccagcccagttaaccgtacagcctaaatgcttacaaattggtgacagcgcgacgatttcacctttatcagttttgtacacccaagccgatcttggctcttctgatttatgccacgcatccacttgcttgattttaaaatcgacacgtttcggctcttttgtaatgtctttaacctgcgccacagctactaaatcctgacccgcttctttttctaaaattggatctactgcgaagcgcaccattggcattaacattccagcagccataaatccccctacaccagtgagcgtatagtttaaaaactgtcgtcttgatacccgatcacccatgcttttcccccctttaaaaaagttcagtccagagaattttggacacatgatggaccattctattaaactaggacataatcatgatatattaatatttctggaaggtcaatacaataaaaacctaaaacatggaaataatctttatttttctaaatttttcgtcattattttgtttgcgcttccattacttattctacagtctttttaaacactccatttctctaaaaaaatcggcaggagctgttgaacttgttcatgtatgagcgtatacttatgcgactcgtctatatgctcaagcggtaaagcaggtatccaaatgcagtgagcccctatttctttttcatattgcagccagtctcggtcgctagtaagcacaaaaagatgtttgacttcattgtcatttatatgctcattccaacgaagtaatgtttcataaacagcagctactccatctttttttaaatatgtaaaactaggtgttaaaatcactcttcctttaaattgcctctctaactcttcagtaagagcagtcgtatattcactcatagatgcagtaagctttaaatcttctccgaaatcaatcggaatgagtggaaccaatacagtatcaacataacttttggattgtaagtatacatccatttccttggcctgaagcttcaacttccttctcctctcagcaagcccgctaaagcttgtcttatttattttccaaaatgaataaggagataaaaaaagagattgacctttttctaagaagctagccaatccctcatttatctactgtacataatggttatttaaatattcgcttaagcgctgaaattcctctttatcgttttcatctaatgctttatcaattagttccatgatttttgatcgctgaaacttctgaatagattcttccaatatttgctcagctaatactctgtctttttcatttgtttgattagcttttggcatatacggattgtcttccagtacagccacatattgaggcgatgaatacaacgatcggaagtttaattgaatataaatgtcttcttctcgattcaaacgaatatcatgaaatgatttttctgcatcagttgtcatgatattttctttataaaaacgaaatggagggtcttccacacagtgcgtagacatcaccatcccgcgaggacaaaactgtgcttgctcaacgaagtgaactcgtttcatcaattgatcatggctcatcaaataatttaaaatccatacacattctcttcgcttcagctgataattcgttaaaaaccagcgaacaaattcttttttctcgttgacagtaacaggggtcgtcatattctcacttccctcctctgtgtttaaactctcagttaaaacaccttttacagttatttattccacacggcagcaataaaatcctctgaactattatttattcttctaattgaaataatatgtcttgaatttcatctactgttggatccattgctaataaggcttggaaaatccccttcgctttcgagcgctgtccttcttctaataagaagtagccatactcttctaaaaacgcatactcttctttaaaaacagtgtatgcagattcgtagtattttagcgctgcttcataattttctaattcttggtgagcttttgctaaatcccattcaaaatgaggatcatgctcattatattctttagcgtgctcgatattctctactacatcttcatatctctcttgactcatataaagtttagagagagttaaaatggcttcaatataccctggatctagtgcaatcgcttgttgaaatgccgattcagcctcttcttctagaccgcgctttaatgctatcttccctttaaaaaagtaaagttctttttgaaattcatcctgcgcaataccttcgttaacagccaccgcagcctcttctagcatctcttcatgttcatatgattttgctaaatataaataaagagaatggtactcacggtctagctcttttagttctgtgaacttttcaatagcggtctgataatgacctgcttgatacgctgaaatcgcatattcaaatagtgtgttaatctcaagcttatcttttagcgcttgatcaaagtaaggaagcgcttcttcgaactgaccgatacctgctaaactttcagctaatcgctgacgaagatctgtgccgttaaattctttttctgtttttagcagcgtttgataaaaaggaatcgccttttgataaattccttgactgctgtaaaattcaccgagcccaaaatctataaccggctcatttggaagcatttttttcgcttccattaacttttgctcacttacttcactaaggccttgcatttgatataagtcagctacaagaagcagagctggcacgtagttatcatcttcgctgctaatttgatttaaaatatgaatcgcttcttcttcttcttctaaatcgataagcatttcagcttttaataaatacagctcgccttcttctgggtatttagcgatgagctcgtctattaaaggcagcgcatcatttactagtccccactcttgaagctgttcagccattaaaaatttttcttcgtctgtagctttatctttcaattcatgaataagggcaagacctttttcaatttcattggattctacgtaacctatcgcgcggtctagttctttcacacacaattctcctttattattacattcactttttatatacaaataaaacgaattaattttctattcttttcaaaccgaagcaagaacacatgcttctatacaccatgataaaatagtttgagcgtttgttcaacaaatcaatttgaatacgcttacatttttcaaataaaaatccgaacgagtttgattctctattaagaatatcaattcatcgttcggattttccttcaaccaaaatgcgcttgttccagcctctttcttattcgcttagtttatcaagatcttcaaagaaagtaggataggagacgtgaatagcttcacttctcattagtgtgacctctcccgttgcaatggctgctgcgaccgcaagcatcattccaattcgatgatctccatagctgtctacttcaccactttttagagccgtcttgccttcaatgatgaggccatcagctgttggagtaacagaggcaccgagcttgcttaactccgttgcaaccgtatcgatacggttcgtttcttttacttttaattcttcggcatctttaataactgttttcccattggcctgagtcgccaaaagagcgattactggaatttcatcaattaaacgaggaattacatcccccccaatttcaatccctttcaactgagacgtttcaatcgtcaaatcgccaataggctctccattttgaatacgttcattagaaattgtaaggcgtgcacccatttgctgaagcacatcaataatacctgttcttgtagggttgagtccgacgtttttcaaaacgattcggctgtttggaacaatggctcctgcaacaagaaagaacgcggctgaagaaatgtcaccaggtacgtatacatccgttccgcgcagagattgtcctccttcaatgcttacagtcgttccatctacctctacgtctactccaaaggcgcgaagcatacgctctgtatggtcccgtgatgtaaaaggctcggttacttttgttgtgccttccgcatgaagtcccgctagtaaaatcgctgattttacttgtgcacttgctacaggagaatggtaatgaattgcttttaaagctcctcctcgagtggataaaggcgtatattggccgtgctcacgcccatcaatctttgcacccatagagcgcaggggcaccgtaacgcggctcataggacgcttggcaatcgactcatctccaattagagacgtatgaaatggcacacctgcaagaatcccaagcattaaacgagtagtcgttcctgaatttcctacatctaagatagaagcaggttcacttaacccttcgatacctttaccttctacttcgacatactcgtcttctcttttaatcgatacgcccatcttttcaaaacacgaaatcgtacttaagcaatcttcccctgctaaaaaatgattaatcgttgttttcccttctgccatcgctccgaacatcacagctctgtgagaaatcgatttatctccaggaatagaaatttctccttggagagatgaaagattagtttttaattgttttccactcatttcattcacacctttcgtacattaagaaataaacgtctgatattgatgctgatggagacacgctcttgcccgctttctatcttcctctgtttgaaagctcaaacgtaatactccgtatatgtcttctcgtgtttctaaaattcgaatgtttgtaatactgatttcatcttctgctaaataacccgttacttctgaaataatccccggatagtcaggaacatccacatagagatcataaaaggatggaatcgctcctttggttcgtacaggaagctgatctctaaattgttttgcttgtgaaaaatatgtatagatatcgttcgcgtcttttcgttcgatcatatttcgcacgtcgttcatttcttcaagccagtggtcaaacattgaaagaagcgcatcctggttatgaagcaagatatctctccacatcgctggactgcttgaagcaatacgtgtaatatcacgaaaccctccagctgccagctgcgaaactagctggttgtcttgttggtaatattctgcttgatgaacaaggcttgcagcaataatatgaggaaaatggctgatgacacccgctaatttatcatgttcttttggtgacatcacaataattttagcttttgtaccacttagcaattcctttaaactgcctaaagcctgcgaagaagtagaagatgaaggtgttaatacatacattgcattttcaaacaaatgagctttagaagcagctactccgcttttatgagacccagccattgggtgaccgccgataaactcaatacctttagcaataagagctcccgctgttttcacgacctcttcttttgtacttcctacgtctgtgacgataacagactgtttaagcgtaaaatattctaactgttttagcacttccgctgcttgagtgaccggaatggcaataacaatataatccgcttgctccgcgccttgttgtaaagaagaagccgcttggtcaattacacctagagttttggcaagctccagctgctcttgattaatgtcaaaacctattacatcaagatgatgatgcgtcttttttatattaagtgccagcgatcctccaattaaccccaaacctataacaaaaacattttctttcactttccttcacctcattgtacatatgaagatgagagtgtgaaatcacactctcatcttttactatattaggtattaagctttcgctgctgcttggttaacaaactgctgaagcaattcaataatttgttcattttgttcttttgttcccactgtaatacgaacggaagttgggaagcctaatgcattccctgaacgaacaataaatccgcgttgcaataaaaattgaaacacttcatcgccttgacggccaaaatcgattagaacaaaattagtgaaagacggataatagtttaagccattcttatcacagaaagcatagtattgctgcaaaccttcttcatttttctttttacactcttcaatgaacgcttggtcttcaagagcaacgattgctgctttttgagccatgcggcttgtattaaaaggttcacgagccggctcaattttttgtagcaatgattcgtttgcaataccgtaaccaatgcgcaaagaagctaagccgtatgcttttgaaaatgtgcgaagtacaattaagttttcgtattcattcaaaaactctaccgtatccggatagtcggcttgatctgctgcatactcaaaataggcttcatccataacgattaatgtatgcttaggaacttgtttcataaaagaaattaactcatcgcccttcacatacgttcccgttggattattaggactgcatacccacacaattgtcgtattttcatcaattgcacgaagcatagcatgtaaatcatgatctccgccgcgcagcggtacttcacgaatttctgcaccttcaattacggcattgtgcttatattgaggaaatgacggcgtcggcatgacagtattggtatcagccgatagcaaagctcggcaaataatttgaatgacttcatcagacccatttccaaaaatcagctgatcttgctctacgcctacgtgctttgctactgctgcacgcagttcagctgcatagccgtctggataaagcgccatattttcgatttctgcagcaatcgcctcttttactaaagcagaactgccgtaaggattttcattagacgctaattttacaacgcgatctaaattaaattcacgctttacttcttcaattggcttacctggtttatatggagataaagttagtaattgttcttttaccttcaacgtgttacacctcgcatttttgtataggcgaaacgatggatgcaacatactcctcaatttgatttaatccgtctcggcgtgtatccttatttaaaagaacttgttcaagctggccaattttattaacaattgcacttccaattacaatgccgtcgctatgttcttttaatacctctacttgttcacttgttgaaatcccaaaaccgacggcaaccggtatagaagctgctgctttcacatcttctaaaaaggtgccaatatcaactggcaacgtagagcgaaccccagtaacgcctaaagacgacacgcaatataagaagcccgttgcatctgcagcgattttttggatacgctctttagatgtaggagcaaccattgaaatgtaggcaacttcattttcagcggcaagctctcggatacggccactctcttcgtacggtaaatccggaattagcactccatctatttcattttctcgcattaacgcgaaaaaggattctaaacctaattgtaacacaggattaaaataggtaaagagaattaccggtattttcacacctttttttctcatcaccgatacaagcttaatggcttttgaaatagacatgccgccagataaagctcttttagacgcctcttgaataattggaccatctgctaaagggtcagaatatggtacgcccagctctaaaatagaagcaccttgcttttgcaaagacaaagcaatttccaccgttgcatcttcatgaggatctcctgccgtaataaatggaataaacaatgtttcatgtttaggtagtctcgcttcaaacgtattcatgttcttcttccttcccttctagcaagtttactaatgtatgaacgtccttatctcctcgacctgacaagcaaattaaaatggtttcttctttcgtcatgcttttggccagttcaaatgcttttgccaacgcatgggcggactcaatagccgggatgattccctctgttttcgccagcagctgaagagcttcgattgactcatcatccgttacactttcatattctactcgtccaatagatgaaaggtgagaatgctctggaccgatacctggataatccaaacctgctgaaatagaataaggctctgtaatctgaccattttcatcttgaagtaaatacgtgagcgttccgtgaataacaccttttgtgcctttagccattttagcagcatggagggctgtatttagtcctttccctcctgcttctacgccgatcaagcgtacattttcttctttaataaaatcataaaacattccgattgcattactgccgcctccgacgcatgccacgacagcattcggaagtttgccttctaccgctgtaaactgttcttttgcttcttctccaataattttttggaaatctcgaaccattttaggataagggtgcggtccaatggccgaaccaattaagtaaaaatgatcttcgcaatgttgaacccagtagcgaattgcttcatttgttgcatcttttagcgtttttgtcccagaagttgcaggaatgacttccgctcctagaagcttcatgcgaaagacgttcaacgcctgacgttcaatatcttcttctcccatgaatactttacattccattccgaactttgcagctactgtagctgtggctaccccgtgctgacccgctcctgtttcagcaataatttttgtttttcccatacgtttagcaagtaaaatctgtccaatggcattattgattttgtgagcacccgtatgatttaagtcttcacgtttcaaataaatttttgccccgccgagcgtttcggtaatattatcagcatatgttaaagctgttggtcgcccagagtagttaacaagtaaggatagatactcatctttaaatgccggatctttcattgcttgattcaaagctgcttctacttcttcaagtggcttcattaatgtttcaggtacgtattttccgccaaattcaccaaagcggccaaattcatcaggatgattgtatgtcatagtatgatcttcctttcaatctctataatttttgtatagtccttcgttccatttgtttcaataccgccagaaatatcaatcgccccaggcttgtagggtaacaagttctcaatgttacaagcattgattcctccagcaataaagcattttttacctaacctttgggcagctgattcatactgaggaacgaaactccaatcaaaagcgacgcccgttcctccaaattgttctttaaccttgctatcaattacatacccgtcagccttttcatatacatgcatttgctgcaccgtttctttattgtgagggagcgctttccatacttcatatccacgctgctttaaccgacgtacgtccgcagctgtttcttgcccgtggcactgaattacatctaaatttgttacggaggcaatttcaagtatttgatctaccggtgtattaacaaatacccctactagcgagacttgtttttttatttcatccgttacaaactcatttactcgttcaggctttacatatcgtttacttctaggatagaaaataaagccaatgtgagtagcagccgacttttcgattaaagctatatcttgttttgatcgaataccacagtacttaatgagcatattcactttccccaaacagcttttcaatcgctttggtttgattatcctgtctcataagcgattcccctactaaaatagcttttgctcccgcttcttttacgtaggaaacatcatcgtataagtaaattccgctttcactcactagcagctgatttttcggaacatgcttggctatttctttggtctgttgcacgctggtttcaaacgtgtgaagatttcgattattaataccaataatctttggggtaaatacagctagcagcttttcaagcgtttctagagaatgcacttctactaaacaatctaactctttttcagcagcttgaagataaagctcttgcaattttaatggttcaagtacttctccaatgagtaaaatagcatcagcaccgattcttgcactttcttccacttgaatggaatcaatgatgaaatccttgcgaagcacagggatagagacatgctgtttaatgtcacttaaaaacgttcggtttccttgaaaatagtgctgatctgttaacacagacaaagcatctgctttccctttctcgtaggctttagcaatttccacaggctgaaaattctcttttattaatcctttggaaggagaagcttttttcacttctgcaataagagccagctctcgattcggatttgataaagcgtctaagaatgatcgttttgcaacattttgctgttcgggtaactgtaagttttgaatttcttctttttttgtttcaataattttattgagcatgttcaaccacctttttcgatttcaatcgttgtaattgtgtgtatgcagcacctgattcaattgtttctaaagctacagctactccttcttcaaaagtagaaacgtttccgctaacgtaaatagctgcagcagagtttaatacgactgcgtttttagcagttacattgcttttatttaaaaatagcgattcaataagctcggcactcgatttcgcatcttctaccactaagtcttcaagcttccctctctgtaagtgtacatcctctggtgcaagcgtatattctgtaatgacattgccctgtacttctacaacatccgttacagccgtggcactgatttcatctaaaccgtctctgcccgcaaccagaaggacgtggttagctcccagtacaacaagcgcttctgctaattttcgtgcaagctcaatggaataaacgccaattacttgctttgtgcagttagtagggtttgctaatggacctaatgcattaaaaaccgttctaaatcctaattcctttcgagtagcagcaacgtgtttcatagcagggtgataaagcggcgcaaataaaaaggacatattgaggtcagccaccgcatttttcacttctttttcatttccttgaatccatatatccagatgttctaacacgtcggcgcttccacttttagaagatacggctcgattcccatgtttcgcaacctttactcccgcagcagatgccacaattgcactagccgttgagatattaaacgtagaggccccgtctcctccggtaccgcatgtatctactacgtttaattcttctagagaaatagcattcatattatttttcatacctcggacaaaaccaacaatttcatcgacggtttctcctcggtacgttaagatggttagtacgctagcaatttgagctgccgggactttaccgttcataatatcattcataattttttctgcttcttccgctgaaagtgactcaccgcgcaaacacttttttaacaattctttaaacatatacatcctcctttttatcgtagatgtcttgggctaattgaattgttttgattaaagcgctagctttattgcgggtttctttccactcaagctccggttttgagtcagcaaccactcctgctccagcctggatataagcggtctgatctttcaaaagaatggtccgaatcgcaatgcacgaatcaatgtttccatcaaatccgagatatgctacggttcctgcatatacatttcgcgccactggttcaatttcatttaagatttgcatcgctcgcacttttggagcgccagatacggtacccgctggaaatgcagaaagcagcgcatcaatgggatgtactttttcgtcaaggcgccctgtcactttagaaatcaagtgcatgacgtgcgaaaagttaacctgctgcattaatactggtgtttggacacttccatactgtgcaactcggccgatgtcatttcttgctaagtccacgagcatatagtgttctgcccgctctttttcatcgttaattaagtcttcgtataagcgcgcatcttcttctgcatccctgccacgtcttctcgttcctgcaatcggatgaatttctaaatggccgttttcaatttgaatcaaccgctcaggagaacttccaattagctccacgccttttactttcacgtaaaataaataaggagagggattaactaatcgcaatactctgtaaatatcaaatccagctacggtcgtatcaatttgaaatctctgcgacaatacggcttgaaaaacatctccgcttttaatgtattccttaattttttccacatcttgcacaaatttatctttttggtatgacgatgtcacgccttcaaagctaacttcgcgctgctcgctttcaaacatcattggcttttctttcaccgtctgcgctattctttcaacatatctattgatctctgctagagcttcacggtatttttcttttttctgctgctctttgtcttgctcattaagctgaatgtagtgaatcaccataagctcttttgtttgatgattgtacgcaagcatcgtttgacaatagataaagtgaaaagtaggcatgttcaaatcattttgggcatgtacgttcactttttcaatttgcgatacggcgtcgtagctgataaaccctactgctcctcctttaaaaggaagtgcaaggtctggtactttcactttcagctcttgctgaattttacaaaacacctctttaaagctgtctccttgcagcataggctgaagctgcttgttttttgctagatagcttccgttttcttcctcaacatacaaaaatggatttaagccaataaaagaataattggaccatggtgatgattcatcattactttcaagcaaatatacggcttcatcttttacttgttgaaaaagatcaacaggtgtcatgctatcgataaatattttttttataattggaatggttaaatactctgtagagtcttctaaaaaagaagtatacgtgttcgtcatatctttcaatcctccatttcatggagaatgagaatagatgaggttatataaaagaggatataataaataaacccaaagacacatcaaaaataggcctttgggtatacgaatggtaaaattcactcaactaaactctgctcaactgtctcattctcgtctaccctaatctcaactaaactgtctattgttttctcataactaaaatctctaaactaacttgttaccaattgtagtacgtttcaaattcatttgtcaactactatctacttgactttagacgaaactaagctttaagctcttcattcagcagtttaagaatcacttcatcttctacttgttgaacaaaaggtttgcctatgccttcaagcagtaccatgtgaacattgcttgatttagacttcttgtccgctttcattcttacaagcagtttttcagctgaaagatggtttgggacagacgtcttgtagccaaatttttcaaaccatttcgcaatgtcgtccacagagaactgacttttttcaagaacattgctgactttcatagcaaacagcataccaatcgctacgccttctccgtgactgatttttccatagccgcactccgcttcgatcgcatgccctagcgtatgtccaaagttcagatgagcgcgaacgccagcttctgtctcatcttcttttacaacagatgctttgactaaaataccgttttgaatagcataaattaatttttcatcttttaaatcagtcagcgattgtatattttgctgaagccatttataaaattcttcatcgtgaataaaagcgtgtttaatcacttctgcaaaaccggaacgccactctctttcgggaagcgttttaagaagatcaatatcataaacaaccgcttcaggctgataaaaagcaccaatcatattttttccaagctcatgattaatggctactttaccgcctacagcactatcgtgagcaagaagcgtcgttggcacttgaataaaagaaattcctctcatataagtagcggctacaaatccagctaaatcgcctactacccctccgccaaaagcaataacgagcgcattgcggtcaagctgctgttcgagcgcaaatgtctgacaatcgtagtaatgttgaaatgactttgcatgttcaccgcttggcactacgtatttagccactttaaactttgtatcgatcgcttttacaaccgcttctccataatatgaatctacagctgaatcggtgatgattaacacggacgacagattaggttttacactctcgataatagaaggcagcttttcaattaatccatttcctaaataaagaggatatgttttggataaagtttgaatatcaatttgcaacattaaaactccctcgcatgtgcacgcattttctcaatattttcagcaattaaatcaattcggtcttgtccaaactgttcgattagcgcatcagccaattcccaagctacaacggcttctgctacaacgcttgccgccggcacagcgcagctgtctgaacgttcgatgcttgcctcgaaggcttcttttgtttcaatatcaacactttttaacggcttgtaaagcgttggaataggcttcattactccgcgtactacaattggcatacctgttgtcatgccgccttcaaagccgcctaagttgtttgttttacgggtatacccgttcttttcatcccatagaatttcgtcatgaacttcgcttcctggtctgcgagccgcttcaaatccaatcccaaactcaacgcctttaaatgcattaatgctcataacagctgcagcaatcttcgcatctaatttacgatcgtaatgaacatagctgcctactcctgctggcacgccttcaataataacttctactacgcctccgatagaatcgccatttttcttagcatcatcgattgcttgcatcatgtctttctcaacagctgagtcaaaacatcttactggagaagcttcagtgacttcttgaagttcctctaagcttttgtattgaggcggatttgcctgtacgccgccaatttctaatacatgtccagctacagaaatcccgaactgagcaagaatttgacgagcgacagcacctgctgctacccttacagttgtttcgcgagctgaagaacgttctaatacatttctcatatcgcgatgaccatatttaatagcgccgtttaaatcggcatgccctggtcttggtcttgagattttacgctttacttcttctgattcttcttcagaaattggctcgatgcccataatttttgtccagtgtttccagtcgttattttctaccgctaacgtaataggagatcctagcgtatagccgtggcggacaccgcttaaaatttccgcttgatctttttcaatttgcatacgtcttccgcgaccatgacctttttgtcttcgcgctaaatctgtattgatgtcttcggctgttaaaggaagccctgccggaacaccctctaaaatagtagtcaattgtggaccatgtgattctcctgctgttaaatatcgcataatcgtacctccgcttaatatgtattattcgtcagaatttttccatttttaaatatgactataccatactataacataagaatgtacaaaaagtttcacctcagcttttaagaaaccgcttcaggttgtctcggttaaatggtctttacttttctgtaaaaaaacgtatcagccgtttcaaatccatacttttgcggagtaaaaacctgctctgtgctacctacaaataagataccgccaggtgctaaagctctgctaaatttttcatataaagcatgctttgcttcatctgtaaaataaataagcacatttcgacaaacaatcaagtcaacgttttttggaaaagagtctgacagtaagttatgtttctgaaaaacaactgtttttttgattttttcatctaataagtacccggttcctctttgttgaaagtacttatttttcatcgaaacaggcatctcctgaagtgaacgttcatcataaaagcctatttttgctttttctatcactttttcatccaaatcagtcgctaatatagaaatacgcgaaagaggaaacaatgttgataaaaccatcgctagtgtatatggctcttcccctgttgaacaggcagcgctccacactttcaggtctgtttttccttttacaagagccggtaaaattttttgctccaatatatcccaccgctgatagttacgataaaactctgaaacgttaatcgtcatccgatctaaaaactcctcaagcagttcgctgttactgctcatcgctcgataatattcaaaaaaactagaaaaaccttttttttcataaagggaggtgaggcggcgtttcatttgagactgcttatatagtgataaatcaatgcctgtttttatttttattttctccacaaacgcgtcgtattcgtctatcattttcgactctcctttctcatttctatacgtttatgttagacgtataaggaaataaaacctttatatacgcttatcttcttattaatatatcggaatacattgtgaaaatgtttatgtagagagatattcgcaatcaatagcctagtacctatgtataaacacaataaaaaagacgaatgaaaattcattcgtctccttgcgctatctaaattagtaaatccaagcgtctgcgtcttttttatagaaagtcagctcttcactttcaaagaataagctgatttcacgctccgcactttctggtgaatctgagccgtgaataatattcttatcaacaatcagtccataatcacctcgaatagttccaggaagcgcttcttgagggttagttttccccaccatttgacgtgatactgaaatcacgttttcaccttcccataccatagcaaaaactggacctgatgtgataaatttcactaactcaccgaagaaaggtttctctttatgttcaccgtagtgtgtttcagctaattcctgcgaaatatgcataagcttagctccgactaattgaaaaccttttttctcaaagcgagaaataacctcaccaataatgcttctttgtaccccgtctggtttgaccattaaaaacgttttttgtatcattttactctccacccctgaagttcatgatatgtaaacaagttttgaaagcgcaatcacacctcatgaagatattaacattgtttcgagcagtttacaacttatgaaagtaaataaatcaaaatttccgttttccaatgtacttcgcaatttgatgcagcgtttttttcgccttgtttggcggcagttcttctaaaatgctcatcgctttttgcagataacgatcgctcatctcaaatgaacgttcaatggcgttagaagatttaatatcagaaataatttcattgatcagctcttgctcatattccctctcaaaaagctgttctactttatctcgaaactcagcattttcaatggcatacaaaactggcagcgtaatatttccttgcagtaagtcgctgccaactggtttcccaagctgttcttctgatgagataaaatctaaaatgtcatcggtaatttgaaatgacattcccacgtaatatccaaaccaaaataaacgtttatgtatatcttcaggagctcccgctgcaattgcacctaactgacagcttgcagcaattagtagtgccgttttacgtttaattctacgcagatacacgcgtaagttttggtttagattgtatttgtccttaatctgttcaatttcaccgagcgttaattccaccatcgtattagataaaattttatgtgcttccacatctttaacctcactcataacttcaagcgcacgagcaaagatgtaatcccctgtatacatagcaatacgattgtcccattttgccttaattgttggttttccgcgtcgcttatcagcgtcatcaataacatcatcatgaacaagagacgccatatgaatcagctcaagcgctactgccacgtgtttgatttggtcgatgttgtaatgcccaaatttagctgccaacaaaacaaatacagggcgaattcgtttcccccctgcttgtaaaaggtgaagagaagcatctgtgataagtgtttcatcggtatgaacagtttgttcaagttctttctcaataagggtaatatccgtattcaaaaaagcgtacatcatttttagtttcattggactcaccttgcattatatattcattctttactccttatcctacaggctgttgcacctgtaggacaagctttttctcttttatcgtttgtaccctagatgcatcgctgctactccacctgtgtaagatttcacttcaacatctgtcaaaccggcttcacggaacatatcagccaattgcttttgacctggaaagtcccttgctgactcttgaagccatgaatattcatcatagcttttagcgaccatctttccaagcgcaggcataatatacttaaagtaaagcaagtacatttgtcggtagccgaccatcgtgggctgagacgtttcaaggcaaaccacttttccgccaggtttcacgacgcgctgcatttcctttaaaacttgaaggtaatcgggcacgttgcgcagtccgaatccaatcgttacatagtcaaatgaattatcttcaaaaggaagttccattgcattgccatgtagtaaggtaatatttgaaaaaggtgagttttttactttctcttcaccaatctttagcatattttgactaaaatccaggccaactgcctctcctgtttctccaactgcttcagccatagctagcgtccaatccgcagttccgcaacaaacatctaaagcttttgttcctttttgaacattcattcgcttcatcgtatctttgcgccatgccttatgacgctgaaaactaataacagaattcatttgatcataatttttgtatattttttcaaatacgccatggacacgctgttcttttgattgctgcatatctctatccttctcctacgacatttttcagcacttctaagctagatgtaagttcatctaagtgctctcttaaaaactcattcatcacaaattcacttcgtaagtatcctctaacaatgtttacagactgttgagtatacgaataaaggtattcttttatttgttcttgattcataccaatttgtttgcaatagtttagcaagagagtagactctttatgctgcaatgactttaattgctttaatatcccgttcaaatacgctgcatgttttaaaagttctttccactcttcacgttcaaaatagtcacataagcatcttacaaacgatgattctgctgctaaaaaactattcataacgtcgtgtggattagtagagcgattgttataaatgtgtatcttagcgatattaatttctttaatagcagatgctataactttcattaaattcagctggttgctttgagctaaatagtaatagtacaggccgctgtaataatctccggccaaaactaccagctgccgctcatgcagctttccttcatttccgctaacattttgagtggagactagatcgtgggtatcaagtgcggtttgaacgagcatcacagatagcacagagctgttctttttttcttcttccattgaaagagtatctaagaacgaacacatgtacagtaatctattttcatcaatacgcggatgatgaatatatttttttacatatggatgacttaattcaacatgaagctgttctttcatgttggccacaatatcatagatggtttttacgctcatcatccttgtctccctttccatcactatttgtttaaagttcttttaactccaaatcgatagtgtcaattataacataattacattataaaatatcctttaaattcttttgaagctttttcacggtttaaatcatttagctgctcatccgcttgaacaccgttcatctacataccatctggatttcttagacagtaatttaagatattgcttttagtttcaccatgtttttcctgttcttattcatttattttaaatataaataaaagcaggaaaatccctgcttattttttcgtatcggattcaatttctccgtgaacagtctgaatgacggctttgccacgaattttaattgcggatgtatgctcagtaaactgcgcaatcattacttcgcctttatctagtttttctgaatgatgaaatcgcgtatctgctcctcgcgttaagccaattacgttaactccatcttcgaccgctttaatgacaatatactccggcgttcctttttgtgtcatattctcttctccttcatcatccacattatgatttaatcagtgataaaacttcagctctagaacttgcatcgtgttctaacactccgcgtacagcagaagtgattgtcatagctccaggctttttaatgcctcgcatggtcatacacatgtgctctgcttccactactaccattaccccgtgcggctctaatgtttctacaatagaatccgccactgtagatgtaattctctcctgaagctgaggacgtttcgcaacagcttctactgctcttgccagcttacttaaaccggtcactcgtccgccttttggaatatacgcaacatgagcttttccataaaaaggcactaagtgatgttcacacatagagtaaaaaggaatatcttttacaagcactagctcttcatgatcttctccaaaaactgttttaaaatgttcttttggatcttcattcaacccggaaaagacttcctcatacattttagctactcgctttggtgtatctaataatccttcacggtttggatcttcgccaattgcttctaaaattagtctcacggcttgttcgatctgtggtttatttacagatgacatgttgttgccctccaattcgttgcattacgactttatgaaaaaaattctagcatatgtatataccaaaggcaaaaaagaaaggtcgcaaatgtgcgacctttcaaagctcttcatcaacggctatgaataaagccattttatgtagatattattttacagcatctttaagagctttacctggtttgaatgcaggaactttgctagcaggaatttcgatttcttcgccagtttgtggattgcgtcctttacgagcagcacgttcacgtacttcgaagttaccaaaaccgataagttgaactttgtcctcagcttttaaagcttctaaaattgtatcgaaaacagcatcaactgcttttgtagcatccttttttgaaagctcacttgcttctgcaacagcattaattaattctgtcttgttcatgccattcacctcctcccaaaatcggatcatataataactaaaaaccttgttagaaaaggaatctagtaattcgttatatctcattctttaacaaaacaaatggatattatacataacctatgtatcgacaagcctaatcataaacgattgaactaaataattcaatgtttttcattcatctgccgtatgtatgtagtgaaaacagtatgatcgatcgatttctgttaaaagattaacatattgaacaaggcatagcaagcagaaaataacgcaggaataggataaccacgcgatctatcacaatatatgtaaagttttgtatgatctatccaaaaagaagaggctcctttatgaggagcctaacgttacatgcttatagaataatcgcgattaaacctccggatccttcgttaataatccgttctagcgtttcttttaacttatatcgtgcattttcaggcatcagcgacagctttccttgaattccttctcttacaattgaacttagagagcggccaaatatatctgaattccaaattgaaagcggatcatcttcaaagtcttgcatcaaataacgaactaattcttcgctttgcttctccgttccgataatcggcgcaaattctgattctacatccactttaatcatgtgtatagaaggtgccactgcttttaaacgaactccaaaacgcgatccttggcgaataatttcaggttcatcaaggctcatatccgaaagcgaaggtgcagctacaccataacccgtttgtttaaccatacgaagggcatcagagacttgatcatactcggtttttgcatgcacaaaatcttgcattaactgcagcaaatgatctcttccgcgaatttctactcccacgatttctttcaaaatctggtcgtataagtcatctggagcatataagtcaatttcagcaattccctgccccatctcaattccggctaatcgagcctgatcgataaattcaaactggctaaattgctctactacccgttcaacgtctctcagcctcttaatatcttttaccgtttctttaacggcttcttgatagctttcacgcagccaatgtttatcttttaaaaccattacccagcttggtagattaacgttgacttctaatacagggaactcgtagagtgcttctcttaatacgttcatcacatcagtatcgcgcatgctttccacgctcatcgctaatactggaatatcatatttttcattaagctttgcacgaagcttttctgtatcaggatgatatggctgtacggtattaataaccatgataaatggtttgcctacttcttttaattcattaatgacgcgctcttctgcttccacgtaatcttgacgaggtatatctccaattgagccatctgttgtaatgacgacaccaatcgttgagtgttcttgaattacctttctcgttccaatttcagccgcttcgtgaaatggaatgggttcttcataccaaggtgtattgatcattcgaggtccgttttcatcttcgtaccctttagcccctggcaccgtatatcctacacaatctactaaccgtatgttaacttctagcccgtcatctaccaaaacattaactgcttgattcggtacgaatttcggctcagttgtcataatcgtttttccagctgcactttgtggtagttcatcttgtgtgcgagctctttctgcctcgttctcgatgtgaggcaggaccaccagctccataaattttttaataaatgtagattttcctgttcgaactgctcccaccacacctaaatatatatcgcctcctgtacgttcagcgatatctttaaatacatccaccttttccaaaagatcccctccgatctatgagttcatggaatatgacatccattgcgagagtaaattaggacactatatagttatgacgttgtcctattaaaatatgacttttgatagaaaaatttatgatttttttcatgcacatgctgacttagtcattctgattatcattattggtgtacaagaaagagaaaaccccttctctctgaatattattcaaggagaaggggttcatgacttattttttaaaaaatattggttcattcttatcgttgactgtataaggaagagagtaagcaggtacaaaatcactgttttccacaaggagctttcgtatatcttcaccaggtttgtaggagcttttatgcttttgaatggcatcatacaaatcaggacgataatctacaaatacatctccctgcccattaacaattaaagaaagactattccctgtatatgggctagtaacgacaggaggctctttcatattcaattttttataattaatagagaatacgccgggagcgatgacgtctttaaacggtacgtaccctttatgattttgacggtatatattcaaatgtacgttaacatcttgaatcgtatccgccatccgtaagtctaataatttaaccgtgggctttgtttctgcatccacaagtacgtacgcaaatacccctccgctttcatatgaatttccaggtgcgtcttgcatgtatctaggaacaattttcgtaaagtcaatcggatatttttgataaatcggcgtgtccatatctttcgtttttattggcaataagcctccgctttcttgtttaaattgatcaaccgccgtttgcacggaagcaacttgatctttataaggaacttgattttgagacattctttccgtcgggtacaaacaaccggataatacaaaaatggttaacccaacaatagacgttagcatgaattttttcatttttctcaccctaccatatgtacattaagcatctgtcggcccgctgaatacaacaattaccataataagacctgctacaatcataagcaaataggcaatgaaagcgagtacaattttaccaatgcggttcgtaattttataacgactaaagtaaatagaaaataccgaaataaacataaatacaatggagcccaatgaaatccacatctttaacaaacctggcgacaaattgcatccactccttttttcaccgttattataacataaggacttatagttaagatggatattgatagaactttctaaattaactatttatttaccttccagtgattcatggtctatagtaattactttcctattaaattgacaaattcctgctttttcacataaaaaaaatcgaagcgaagggggctcttcgcttcgatcataactaaatattcccatactaacagttctactcatctttatttacacgttattttatgcaagtaaatgattttgggtatcaccaattgcctattttttcatatttctttgcacttaatttaatttttctcctaaaacattcgctaaatcttccatttcatgtgttttagtacgagacataagcgcgtctactgcatcctttgccttcacatcattaaacagtacattatataaagcatcagcaatcggcatttttacgtcatatttttgagatagctggtaagctgctttcgtggtgcgtacaccttctacaaccattcccatattttctaatacttcgtctaaatttttgccttttccaagaagattaccagcgcgccaatttcgagaatgaacgcttgtacacgttacaatcaagtctccaatccccgttaaacctgagaacgtcagaggattagcaccaagcacagtacctaaacgagcgatttcagccaagccacgagtcataagagcggccttcgcattgtcaccatatccaagtccatccgtgataccagcagcaagagcaataatattttttaacgctcccccaatttccacaccaatcacatcaggatttgtataaacacggaagtactgctgattattaaataaatcctgcactttttctgctgcttgtatgtttgttgaagctgacgtcacagttgtcggctgccttctacttacttcttcagcatgactcggacctgataagacaacgatgtcttttgtatcaatttcttgttgaatcatttgagatatacgtaaaagagaatccggttcaatccctttacttacgtgaacaattgtaaatagttcatcggtaagggattttagctgctgcaacacttcacgaatcgccttcgttggaacagctaaaataagggtttcaacaccttctattgccttttctaatgacgtaaaacctttaatctgatgaggaagctctacaccaggcaaatatttttcattcttatgcgtctcgttgatttgatcaatgacttgttgtctatgtccccaaatgcgaacatcgtgtccattttccgccaatacgaaagctaatgcagttccccagcttcctgctcctagtacagctattctttccacgccgatcacatcctctgttattttcttggtcttgcaataattttaattggagttccttcaaatccaaaagcttcacgaagcttattttctaagaaacgtttatatgaaaaatgcattagctcaggatcatttacaaacacaacaaaagttggcggcttaattgctacttgagttgtgtaatagatttttaagcggttgccgttgtgagtaggcgtagggttcattgctactgcatccataatcacatcatttaagatgcttgtttctacacgtaccgcatggctttcgcttgcaagatcaatcattggcaatagcgtatgcgtacgttttttcgttttagctgaaaggaatacaattggagcatatgttaagaactgaaaatgctcacgtatattctcttcaaattttttcattgttttttcatctttttctactgtatcccatttgtttacaacgatgacaacagcttttccagcttcttgtgcatagccagcaatcttcttatcttgttcaataataccctcttcagcatttaatacaactaagacaacatctgagcgttcaattgcctttaatgcgcgcagtacgctgtatttttcagtactctcgtacacttttccacgctttctcattccagctgtatcaataacaacatattcttgatcttcttttgtaaactttgtatcaatggcatcgcgtgtcgtgccggcaagatcactgacaataacacggtcttcacctagaagagcattaactaatgaagatttccctacgttaggacgaccaatcaatgaaaatttaatgacttcttctccgtaatcttcgtctttttcttttggaaagtgcttagctgcctcgtctagcaggtcacctaaacctaaaccatgcgttcctgagattgggaacggttctccatatcctagtgcgtagaaatcatagattaattctctcatttcaggattatctactttattaacagctaggacaacgggctttttggatttgtataaaattttcgccacttcttcatcagctgcagtaattccatcgcgtccatttactagaaaaatgattacgtccgcttcatcaattgcaatttctgcctgctgtttgatctgttctaaaaatggctcatctccaatatcaataccgccggtatcaataatgttaaagtccacattcagccactcacctgaactatagatacgatcacgagttacacccggaatatcttctacaatagatactcgctctcctacaattcggttgaaaattgttgattttcctacgttgggacgaccaacaatcgcaataattggttttggcatacgattcttccctttccttgatcttttttatgtatcggcaaccagtctttaatcgactaaaggtatttatctacatgtacaaataaataagatcattcttttttcaaaaattgaggccatgcagcgtggcatgacctctactaatcgatcataagcgataaagcaggctttttatcagctctattttacatcaagctgattaactgcctatccgctgaataagcattactctttcaatcaaacaattttatcaaaaatcaccggtaacaacaatataattttacgaaatctcttcttctatttgtaagtactttgcttttgcctgtgagacttcagcacgtacaaatctaaataagcagagaaataaaccagcatctcccaaataaacatagctcctactgctgttgctaaaacgtcgagtgtccgaagagaccctacttcataagatgcaatatctcgaatgacaactgcgtataaaaaatctcctccaactacacctaaaatgagcgctgcgaatcttttttcagcatctttaatcaccataaagcaaatatataagataagtccagtcaaaatccacttacggtcaataaaaatccatacaggatcatagagctcaagtaaacaaaaaccagcataggcaattattattatgccgcatacaataacataatataactgctgaaacctgctgtagcctgaagcataaacacacgctacccccactaaaaacaaagcggtatagctacatgaaaactgagccatatgcatgttcattccgcttaggagtatactgattaatataatggctgctaccttccaacgcctaagtgttttgggcataagaaaagtcgtaacaatccatcccatccacgaaagccaataaaagaaaattccgtccactgaatatggcacctcctctacctgtcatcagtatgtatcaatttggtaaaacttaatcggagttttagaatagaacctcttattttggacaacctatcagaaaaaaggagggaatctaaaatgggaaaagatcgtcaagagaaaaaattaaaagaatcaaaacgagttgaatctgaccgtgatcaaggacttcactatccgggagcaactagcttgcaaagtcctgaagaagcgcgcgagttaaatgagcataaataaaaaaatgcgctgactaagtcagcgcatttttttattttaaaactggatgtgaaacaggataggaacgttctttctttcctgtaaacaaaaagagaactcctcccactaacaatagtgctcctgacaaataaaacccgaattccatacttccaagtttatctgcaaaatatccggtaatgtaaggtgcaaagatcgatgacagcatgccgctgaagttgaaaaaaccgtacactttagagtacatggacgatggagtaatatccgccatatacgaaatcaaaatcggatctaatgctaatttacctatcaaaccgtacacaattaagccgattaatagccaagaataactctctgtatagggaataaaaaattgacacaaagcgcccgctactgacaaactcacaattaatgcttttttatttgcaattcgatcagatatatacccaaagaagattgctcctggaatggacgcccaaggtactaaagatgctatgatgcctgtttgagacccttctaagcctcgcgagtgctgcaaataataaggaagccaagtcagcatcccaaaaaatccgtaaagagagcagaagattaaaatgtatacgaaaatatgattttttgtaaataatacttttagcgactgctttgtttctttatttagcgaatttttttcttgatccctttgcttatcttttacaaagaaagctattaaaatagctattactatagttggaatagcaaataagtaaaaagtaaactgccagtctttttctaacgtatatgtaatgtatgtagaaccgataaaaccaagtgatataccaaaagccattccactattaatgagcgccgacactaaacctcggtatcgttcagatgtgatgctcgaagaaattccgtattgtgaaccataatacgttccttctccaagtcctgtcagcgcccgcataagtaagaacataccgaaagtagttgtaagtcctgtaacaaatgtggcaactccaaacaagatgtatccagctactaagatcttaacgcgaccaaattgatctgccaaaaaacccgttggaatttgcatagctgcatatgctgcaaaaaatacggtagacattagcccaagttcagatttattaagatcccactgcgcaccgatatctcccataaccggagataaaatattacgatctgcatacatgaaaacccaacctaaaaagaaaagaaaaattgtaaatataggatgtccctttttcatcacgccacctcttttttctgatttttctgtttgttttacttattataaggggctaacgtttgggatttcatgctttttgtcacttcttctgccaacattttttgtttttttaaatgaaaacgcgatcattcatcttttaaagaaataaaaaagcacgcagtcaactgcatgcttttttatgatctgttattaaatgtttctatagatacatttcgctgagtcagccaactatgggtatcccctgtaataactagaggcatttgctgaagcttagcaatagaggttgctcctagcgcagccatgatgaacgttaactcctcatgcagctcggctatctcttctacaactgcttctaaaccagacttcattaaaatagataaaaaatatcctgccattcccgttgcagaagctcctaacgcaatagacttagcaatatccatagaggtttgaatacctcccgaaccaataatggacataccttctacgtgctgagatacttctgctaaagaagctgctgtggaaattccccaatcattaaagaagtgaaaatgttttgctcgtctttcattttcgattttcgaaaaattggtaccaccgtacccaccaatatcaacgatttcaacaccaacatctttaagcttttgcactgcttgagcgctcatcccaaaacctacttctttgacaattacaggaacggttacttcttggacaatgcgttcaatacgacgtaatgcatcggtaaaatcacgatctccctccggcatgaccagttcttgtataacatttaaatgaatttgaagtccatttgcttcaagcatatcaactgcttttttagcttgttcaactgtagcttcactgcctaggttggcaaaaataattccgttagggttttcttgacgcactactctgtatgattgttcttccttttcatctttaatcgcagccatctgcgatccaacggccattgctaattgaccatgatgagcaatttgagcaaacgaacggttaatccgttccgtttcttgtccgcctccgcccgtcatagcatttataaaaattggcgaacttaacaaaagttcgccaatttttgtatcaatatgaacatcgtgcacgccagtatttggcaagctattatgaacgaagcgaatatcatccagcccgtgcagccgatgctgtcccgtttgaatcgcatgatgaatgtgatcaattttacgttttgctctgctcacaaatcatcaccattacttatcttaatttttttaattgatccccaatcatatcacctaattggaaaccttttgactcttcttgtaattcatagtcaccgtaatcttcttgttcttcttcctcaagatcacgaatgcttaacgaaacgcgtcgttcttgttcattcacatcaagtactttcaccgtcactttttcgccttcagaaagcacttcatgcggtgtcccgatatgcttatgggaaatttgagaaatgtgtacaagtccttctactccaggtagaacttccacaaaagctccaaaagatacaagtcttttaacggttccatctactacatcaccttggcgaagcttcgtagaaatgttggaccatggaccttctaacgtatctttaatagataatgaaacacgccccgttgatttgtcaacagacaatactttgactttcacagcatctccctcagctactacatctgaaggtttttctacacgcgtatgtgaaagctgagaaatgtgcactaacccatctactccgcctacatctacaaacgctccaaagtctgttaagcgctgaacggttccttctaaaacctgaccttcttttaatgactcaagaacattttctttttgttgtacaagctcttcttctacaactgcacgatgcgaaaggatcacgcgatttttttctttatctaattccactactttgaccgtaagagtttgatcttgatactctgcaaaatcatcaacgaaatgagtttcaacaagagaagctggaatgaaccctcttacaccaatatctactactaatccgcctttgacaatttctttgactaccgcttcaaacacttcacctgaagaaagttttgcttctaaaccatcccatgctttttcagcatctacagctcgtttagatagcacaagcaaatcgtcttccactttaattactttcgcttcgacttcggcaccttcttggattacatcgcctgctttttcaatatgtaagctcgctaattcactaattggaataataccgtctagtttgctgttaggtacatctacatacacttgcttttcttctacttttgtaatagtaccttttactgtttctcctacttctaatgacgttacctctacttgattcatatcttctgtcatcgtcttttcctcctccaatatccatctacaatatgtattcccttgtaagagttcttcactcttttagctcatcattattgtatatagctctgtatagaaaaaactctctttgttattaacttctaataaatagaatcttttgtcaagtcataaggttacaaactattgatatttttcaattaattcaccaatgcttttcataataacttcggtcacttcgtcggctgatgcttttcgttcgcgaagctcatccatctgaattggcggtccgtacactacttttaaccttgcaaaacgcttgtatggaccaataacagcgcaaggcacaacagctgcttttgaacgcaaagcaaaaaagcctactccagccatccctttgcctaattccccatctttacttcttgttccttcgggaaataatccaagcacttttccttcttttaaaatctttaacccttggcgcaaagcttcacgatctgccatcccgcgctttacagggaatgtttctaactttggcagaaccgtcttcagaaaaggtgctttaaacagctctgcttttgccataaacgaaataggtcttggacatgtcacacctacagtaggcggatctaagttgtcaatatgatttgaacaaagtaaaactccgccttctgaagggatattttctgcaccgattacttcataacgataaactggtgttaaaatgccttttacaatggcacgtgcaaacatataaaagctcaaaatcatccaatcctttcttttgtaatagaaagtattttttctacaactccttcaatcgataaggaagttgtatcgatttcaattgcgtcttcagcttttttaagaggtgctacttcgcgctcagaatccagcttatctctgcgggcaatttcttcttttaaacgctctaaatttgattcaaaacctttttttatgttttcgtcatggcgtcgctgtgctctttcatccacagacgctaataaaaagattttaacttctgcgtgaggaagcacgtgtgtaccgatatcacgtccgtccattacaacgcctccatctttagcaaggccctgctgtctcgctaccatctcttcacgaactgcacgatgtttcgctacgagggatacagagttagttacttctgcggaacgaatttcacttgtaacattctgcccatttaagatgactacctgtccagattcagacggctttaaatcgatgactgtttcgttaagtaaatgcaatagctcttcttcattttgcaaatctacctggtttttctgcgcttgatacgttagagcacgatacatcgctcctgtatcaacataaatatatgataaggtttctgctataatctttgccactgtacttttcccagcagctgcaggaccgtcaatcgcgattgaaatttgtttttccataagtgcctcccttaatttcaaaacaggaacaaaccactttcatcttttatacaatgagccattttatatgaagcgtttataaacgaaaaaaagagcagggggtcttctcctgcctggtgttcactgcatgtttctttcctagttattctaccatacgtccgactactggtcgaatgtttcaataattttattaaaattatttttgctaactccctcatactgaataacctttgagaaatatgtactgtgactgctagatagtaaaatacattgagcaattattaaaaacacaaattgaataaccactaatttaattaaaattcgttctattcgattcaccttttttctccttttgtaagaagtaatacctttgcttacagtttaggaaagagaagttttttttatacgctaaagaagaccttttcttcttaggtcgagctgacgctttaaggtataacgaatcatcatttctttcgtttgtttttccatgtccataaatttaatagatagctgacctactttacaagaagtcggggcggtaattcgtacaacttccccttttaattcaagatgctgcaaagctccctcacgattaggaagacttaatcgtacaacaaccgaatctttctcattaaaaagcagcgagtgatggaaggagccggctattccacctgcactgatgtttttagtcatgatttccattacatcctgctgttcttgctcactttctatcaccgccttcactgtaagcggcacacggaaaaaatttcttctttggatagattttaactttttatcgcccgggtaaaagagcttcacaacaggcatgccttttatttcacgccctgttacttcagttggaaaagtatatacattttgatcatatccaataaacgtagcaagcaattttgtaccttttagtaaaaaagcacttcgctgcgtttcttcatttagcggatagctaatataaatcacgtcttccgtaaactcaactactttacatcgatatgtttgttgtaatgtagactctctgtgcccgctctctaacgtcagcctcattcccgcttttatcatcttctctctccttcagttccactatatacactttttccctttatttaaacatagttaaatatgtttattttgtaaatacaaattagtcatttagactcaataaaatattaaaaaaacaaaaaaccggtgtctatagacaccggtttttatcaactttacacttcattatataaaggttctgagttttgcagtttttcgactttttcttcaaaacccgtatcggcattgatgaaaatacgatacgtatcattttttattgtccctaaaaactcatagcatagcacttcttcgtttaaatcattcgtaataattgccaagcggtcttccatcacttttacattcgaattcagcttggtttttgcctgttctttcgaaattttaggttttggaatatctcttgtacgatgttttaataagaagtctttagctgagaaaccaatcacagatccatcttctaaagacattttcattttaactgaatccggataaatccgaactccactttccgtttgctctacgaatgtaaagactcccatgttatcatattgagcgctttcagccattactaggctttcaaaacgatgatcttttaaaaacttagtcgctttgttcatagcatcgtttaaactaatattttgttttttaatatctcgatcttcgagcacccaaagcggatatccgcctttttgtgtaatatccatatacgtttcttgtttagtctttggatctgtaatggttaagctgtacacctcataatcggcatcttttccgctctttacaatatgaatttgttcatttccttttaaatccaaaaacgaacgcgccacttgttttgcaacatcttcactaacttctctgccttttaattgatgaaaagcatttttttcctgctcattcgttgcattcataacgcccaaatctgtttcggcaaaagaatccatacttttttcaacggtttttaatccgtcaataatcgtattgtccccttgcttttcttttgtagctagggctagctcaacatccatccagcgcaagttattatcaatgactagatgctgtacttggcgcatttcattttgaatttctcctgactgatcataaagcgaatttaacgttttatactctttatctgttaagggtgatttgcttagatcccttaccgccactttgtacgtaaaatccccaacatctgaaagaaactcttctgttttattgaacggcaaaagcgataaaggcagctgccctacattgttatgagcttcagaagttaaacgccatacttctgcaagcgcgggcgaaagctgatctctcgaactcatggcgagcgtgccaccgattttatcatttaataaatctagctgatatgacaaatcatgaaatgctcgttgatacgtattctccgcttgaagcagcacagcatctttttcttgatgttcgctgtacccccaataccctacacctacaacaccaatagctaacaatacaattaaaattgttcgaatcatgtttccttcacctctctttatcgacagaaaatgtgtttcccgatttgcttaatttgaggacgtgaccaaatccacgcgcttgttgctgtatccggattaaagtaatagatagcattcccagtaggatcccatccgttaatagcatccataaccgcttttttagatgttgggttgggttcaagccaaatttgcccatctgctacggcagtaaatgcacgcggttcaaaaataactcccgcgactgtgtttggaaatgccggactgttaactcggtttaaaataacggctgctacggctacttggccattatatggttcaccccgtgcttcaccatgaacggcatttgccatgagctgaatatcattttgtgaaaacccgctcggtacattcaccgctgttggcttttgtgctttttctttctgttgttcagaacttccgttagacgtattacgctgcggctgactggcaggtttttttgcttgagaagatccgctttgtgatttttgctgaccattgttcccgctgctttttccactgctactgcttcctttagactgctgatcaagaggcttaccgccatagtgcgtaaacttatttccttttctaatttgatttttcacatagttttcgtgatattttgttgcgttggctaatttaatctttgtttgccagcctgctaaaccgtcaatctttttaatgccaaattcatattgaaaattgcgcagtgcccagtatgtgctccatccaaatacaccgtcaattttcccgttataataacctaaatactgaagtctcgactgcagctcaataacgtcatctccaactgctccgtgttgaatgacttgatttgaaaacgcgtgagcggcctttgggctcacaacggacgctgcaataaatgaacatatgcatatgagacatgcatactttttaaaacatcgaaatgataacatgacaaaacctcctacatcgtatgtaactgataagatgataggagtattttttgtaaaggttgtttttttatacaagatgcgcaaaatttaccgaaatgaaaaaactcagctcgtaaatctctcaaaaaagatttacaagctgagcctagacaatcgatggctgtttggccttttttacttttcttaacgccagccaccataaataaatcataaatggaataataataaatacccaatgatccattgtttttaaaatataatcatatgttccgtgtaaaatgagcggcacaaatacggagtacagcgtccacttcgttttttcctttccttcagaaaactttgctttccctaaataatatcccataatgacaccgaataaagcatgactagatacgggtaaaaaggctcttcctaacgctgattctaaaccatttgcaaataaatataaaatattttcaacggtagcaaaacctaatgaaacagctgccccgtaaacaattccatcataatgctcatcaaattccacgtgctgataaatcgtgaaatataaaatgaaccatttgaaaaattcttctaaaaagcttgtcgtgaaaaatgcttcaagaaaaggtgattgaaaaacgtgctcttcaccaaatacatattgtataaacataattggcaaaacaagcattgctccaaaaataaatgtttttaataccattgaaataggctcagtttcatattcatctttcaaataaaaaaaacttaacaatgccaatcctggcgcaatgcctgcagatacaatcgccaacataaatagcgcctcatctcctctattttttttaatagtaacatgttatctttaggatgaaaatctccgtctataatgtccttatctttatatgtaaatgctcacataacttgctgtcgatttacaaagcctaacaaagaccttaaacaagtataccaaaaaatgtatcatacttatatggaaaattgaaaggagctctctatgaaaactgtttatattcttcacaccggcggcacaatttctatgaaagaagacatggcaactggatcggtaacaccagatattcaaaacccgcttcaccgctcaacatcatctgtttcaggtatggccaatgtaatcgtagaagaagcattccatctgccttctcctcacattactcctaaggaaatgcttatactttcaaaaaaaatacgcgataaaattgatgaaggcaaaattgatgcagtcgtgttaacccacggaacggacacgctggaagaaactgcttattttttagatttaacagtgcatacagatattccaattgtcttaactggagccatgagatcaagcaatgaaattggttcagacggtccttataattttatatccgcggttcgggtggctattagtgacggtgcaaaaggaaaaggtgtcttagttgtgatgaacgatgaaattcataccgctgagaatgtgaccaagacccacacaagcaacgtggcgacatttcaaagccctcagtacgggccaataggattaatcacaaaacgcggcgtatcttttcaccacatgcctacagaacatgaattttatcctgttaatcagatagataaacaaatcactttattaaaagcttatgcaggaatggacgaccatttatttcaagcagtggcgtcaatggatgttgatggacttgtaattgaagctctcggtcaaggaaatctacctccccttacacttccggggattcagttgcttttgaagcgaaagatacccatcgtgctcgtttctcgctgttttaatggaattgctcaagatgtatatggatatgaaggcggtggcaagcagttaaaagagatgggcgttattttttcaaatggcttaaatggtcctaaagcacgcattaagctgttagttgctctccaagtaacgaggaatcacgatgaattgcagcagctgtttaatcattagtaaaacaacgcatagaagcctatgcgttgtttttgttgagaatatgagaagcgattgatttcccatgaaaacgtccattttcaataaaaatctcattagcattatttcctgcagcaatcacaccagcgatataaattccttccacgtttgtttccatcgtctcttcgttaaaagaagggcgacctgtttcatcatctaattccacacccatttttgttaaaaacgagtgatcagggtgatagccagtcatggcaaaaacgaaatcgttactaattgtagactctttcccttcctgctcatatgttaccgtgtcatccgttatctttgttacatgagcattaaaatgcatcccaatcgttccatttcgaaccagcgcttcgaattcaggcaatatccaaggttttacgctcggggagtaatctgagccacgataaataaccgtcacccttgcatcacacttcaccaattccagagctgcatcaacgctagagttttttccgcctataacgactacatctttatcaaagtaaggatgcgcttctttgaaataatgaaatacctttgataaatcttcaccaggaacattcatataattaggatgatcgtaatagcccgtagctataatgacattctccgcttcatatgtctctttagatgttgtgacaataatttggttttccgcttgtttgtctacttgcaagacacgttcaaacggctgaattcgaacttgcttgcgcttcaccacttctcggtagtaagcaagagcttggttgcgcacaggcttgcgattttcggtaataaaagggacatcccctatttccagtttttcacttgaactaaaaaacgtttggtgggtcggatagttataaattgcattcacaatattccctttttcaattacaagggcatcaatacctgtatgttgaagctcaatagctgctgaaagcccgcatggtcctccgccaacaataattactttttctttcttcatgcctgtcactccttcagttgtaaacgcaccttttttttattttaacgcagtgtaaaacaaaaaaatctcctcattaatgataggagattttttctatttacgcaattgttctgctgttctgtttttaaatccagcctctgaaacgagagccttccgccatttttcttacgcctatcatataagcagctaggcgcatgtcgacttttcgagttgtagaagtttcgtagatgttattaaatgatttaaccattactttttcaagcttttcttctacttcttcttccgtccaataataaccttggttattttgcacccattcaaaataagaaactgttacaccgcccgcacttgccaaaacgtctggaactaataaaatccctctctctgacaagatgcgcgttgcttcaagagttgttggtccatttgctgcttctaccacaatactcgcttgaatgttatgggcattttcttctgtaatttgattttcaatcgcagctggaactaggatgtcacagtcaagttcaagcagctctttgttgctgatggtattattgaataatttcgttactgtaccaaagctatcgcgtcgatccaataaataatcaatgtctaaaccattaggatcgtgcagcgctccgtatgcatcagatatccctacaattttagcgccagcgtcgtgcatgaacttagctaaaaagcttcctgcatttccaaacccttgtactactacccgtgcaccttgtaattcaatgccgcgttttttcgctgcttcatgaatacaaatagttactccttttgcagtcgctgtttcacggccgtgcgaaccacctaagacaaggggctttccagtaataaagccaggcgagttaaattcatcaatccggctgtattcatccatcatccaagccataatttgtgaatttgtaaacacatccggcgctggaatatcctttgttggtccaacaatttggctaatcgcacgaacatatccgcggcttaaacgctctaattctccaaaagacatatttcgaggatcacaaacaattccaccttttcctccaccgtaaggaaggtcaacgattccacattttaaactcatccatatagatagagcttttacttctttttcagttacgtttgggtgaaaacgaattccgcctttcgtaggaccaactgcatcgttatgctgcgctcggtgacctgtaaaaatcttaactgatccgtcatccatacgaacaggaatttttactgtcatcattcgtaatggctcttttaatagttcatacacttcatcaggatagcctagtttttctaacgctttatgtatcactgtttgtgtagattttaaaacatcatgcttctcttcttgactatttttactgtcttgcatcttgtcggctaccatctgtaaacctcctaaaatgtatcgaaaattattcgtttttaattgaatggtgcttctttcatgacatagtatacacccttagttttacattgcaaaggaaaatatcgaacttttagtattttttgtgttctcctaagaaaacgcttccaataactttacaaggtatgctacaatgttttaagtctgcctcttttctagtatgctttaatcgtctaaaaaaaataaaaaacacccggtgataaagagcactttcaacaactttgtacaagctgaaagtgcagccactcttattttaataaaagtgctttatccttcacgggtgtaattatttcaattaaacaattaagaaaagacagaattaatatactccaaagctctcttttctactaacatttttccatattcatttacgcggtgctttgtaattgtagagggatttccatactccgccaaaaccgcaatcatattcccaacttcagccggtgacagcatgtgataatccaacagcacgtaaaaacgtttttcaaatgaatagagcacgctatccgtatcgtaaaagtttgacatgcgtttggtcagctgaatgacatcttcaaatgaatcaaactcaaaaaacatgtcttcgctttcatctagcatgacctgcatttcaatgaagtcttcgaactcgtcttcatcgaactcaccgtagctggtttcttcttcatactgctttgtcacaaatacaaccattccctgtgcttgaagtgaaaaaacttctaccgaaagagaatttgtaggttcaaagttcagttcttgagaagcttgctctatcatctcacgaaaaagctgttttactttgaatgtatctgtccatagatcttcttttgttaaccctctttcttttaaatcatcgtaggtcaaaaaaacttttagcttattatagtttaatcgttcaagcctcattagcgtccctccccgcttgcactcataaccacatggttcgataatgcagtatatgtattttttggaaaacggttcgtgatgtttacttacgagtttacaggtttatgataggaaagacaagctattctcaatcaatttctgctaatttttttgttagccagctattccactcttcttttgtatttcctaaaataaacggctgggcctcgccttttcttttgctatctaaaacatcaaacacataaccgcctaatcctactttaagatgggggaatttctttatcatttggttcgtcaagtttagtgttttctcggcattttccaacattgtgcatgacataaataaaaatgttgggtctacttctttaacaattaactcgacatctttatcttcaatgctgcttcctaaataaataacttcaaaccctttacggcgtaaaaatagcgtaaagactaggagtcccacttcatgtgtctcattaggtccgcatacagcaatcgctttaggtaataagccatttgaaggcagcgaataaaaaatcatgctgatacgcgtttttaatacttgagtcgtataatgctcatgagcacttgtaatttgccctttttcccacatatctccaaccgtcacgagtagagaacccaaaatatcaataaccactttttctaccgaatacaggctaaaagcatgattaattaaatcctgtgcttttccttcttcaaaagataaaagcatcgttaacagctcatccctaattttttgaggggaatctacttctccttcttcttcaaacgttcctactgtactgctttccgtttctaataacgaaaccgcttgactgatggtaaaacctccgctcactttttccgtgagccattttaatttccgcaaatcttcctctgtatataaccgatgccccgaatcgttgcggacaggatttaaaatttgataacgtcgttcccatgcacgcaaagttcccggctggattccgaccatatttgagatggctttaatattatacttcccttcgtgagccatacgtaacctccaactactcttcgtgaactgtatctattaattgaattataggataagttatcctgtgtgtaaaatttgtatatgctatgtaaagagtttgttcaaggctattctttcctttttaaagtgatataatgcgtttgggctctagcttgtaaacggagaggcaaagaggttgtaccatatccgttactgacaaaaagaggaatctttcttttttctttcagccctcctaattcatacatacccaaattaaataagcgtatctgtcccccgtgtgtatgcccgctcaaaattaaatctacttttgattcttcatctacataatagataacatcaggattatggcttagaagaatggtaagctgttcaggttcaatggaagaaacagctctctttagattcatctgaccttctgataaatcatctacccccgcaaagtggcatgtagtaccatatttagaaacggcaaagacatgctcatttttaagggcaataactccttcatctttaagcatctgcttcaattgcatctgacttacttcgtaatcattatttccccacacaaaatagacgggtcctagcgttttaagctgttgaatattttgacgagcccgcactaaagggactcctccttctagtaaatcaccgcctatgatcacaaaatctacttcgcccggtattttttccaacagcttcgacgaaactgttcgcttatgtatatccgatataaaaaacaggcgcaaaggctgctgatttttaggaaatcttgataaatgaatcgttctttcttcgacatatgtacgatgggcttctgaaaacataaaaatcagcaagcctatgcctaacgctaaaacaattaaaagaataaccatatattctccttcttttcattttatacccgatgtgtttcctttaaagaagaaagggcataaattatcgcaattgttaacaaacctactacttgataaagtgcaatggcacttaacgataaaattcctatcacacatagacatgaaacaaggtattcatgccattttaccttatagccttttagaagcaaccgactttgcagaaacactttacgaactgccgccgacagacaaaaaagagccgtaaaaaacaagattataacactaaacacatctaacggatgtaaaatcatttgaataagtaaataggttaacgaagcttttgagcctacagccgttaaactgctgatataataactgcataaccacgcagccagcaagttaaaccaatccctcacaaaaaaacccccttcactaaacttctatgtaaaaagaggctttttcatgcgattctatttgttttcatgatataaattaattccataggttgactgcatccagcggaacgtttcttttcggtgctcccatgtttcaggcgtcgcccatagctctttgcttcttttaataatctcacagcgcaaatcttgaaaagtcttttctgctttctcgctttttttctgcagctgtacagtataaaagtaaagtgagaaggtaagcaatagaaacatcaaatgtcccatgttgcctaacaaaaatgaaaaaaattcgctaaacgtcctaaaaaaaccgctttgaaatatgaaaaaaaagtagctaataacagccgttacactggctaaaaacaaaagcttccattttttctctttagctttcagcttattgactgtctcttttcttttaataacgctagctaatatatattgaagtgtttcatcgttttcaaagtctaccactttgttttccattattccaccccccctcttatgctagtacaacatatgagggaacataaaagattatgtggggagtattgaaaataatggctgtttccttaacctttactgaattaattcttctggctgtgcagattccccttttgattttcgtatctgcaggcccaataaaaaatcaatgagaaaatgagtaaaaatcgtaacatacaaattttcagtccaccaaaaaagcaaccctattaaaaagcttaaaaacacaaccgaaataaaaagaaaccacttttttaaatatcgaatgtgaacgagtgcaaatacaatactcgcccaaatgaggccaaactgaacttgtataacccctcgaaataatatttcttctgaacatgcaacgattatgcaaataaggatcagatgaggaacagaacgattagcaaataaacgttcattgatccctccgtcatcgtataaatgctcaggtacgcatttcattagaagtatatctcctcctactacaaagagagccgttcctcccccgtacaataaaatagaagaccaatccagctgaaaaaactgcaaaaaggaattccacgaatcgaatgtaaaaaaaccgatgcctaaagcaatgaagcagatgagcagctgtgttacatataaatttttaactagctctgcatctgtcatggatgaaataagctcttgctgtgattttgccattatatctctccttgacgaagcaaacgagctaattctaattcccagccttgaaatgtccattgctcctgctcaccatttgtttttttatagttttctaaatccaagccgcagcaatcgcaacaattctcaagctctgattttcccgtttcatcgaaatagccaagcagcacgtgacgacggcattcttttgtctcaataaaccccttcatcgcacgatacttgtcatgtttgtttcgaagacgtttatttacagccgcaacaatcgtttcatgcagcgatgcaggaattttccagggttcgacatattcatttttcactacattttctttgtacaaataataacgaataaatcgccaatgtgtttcttgaacacccactgtataaagaaagtgagactctacttgttttaaaggaatggcctgatcatggtttcgtaaatacgacaagcagtataagatggtatctgaagaaggaagctcaatttcaagtaaagaatgagcaaaatcatcgtctccttcagcataaagcaagatcgcaatactgtttcgctgatcacgtccacttcttccaatttcctgtacatatgcttctaactgcgtaggtgtatgaaaatgaataacaaagcgaacattcgatttgttaacccccattccaaatgcacttgtgcagcaaatgatatcaagctgattttctaaaaattgctgttgaacaagcattctttcattcggttccattcccccatggtaatactgcactcgctgtatcccattttcctttagaagctgcgttaatgcttctgtccaagatcggctggaacaatagataattcccggaccttgcagttcactaacgtacatcagtaatttctcttttttttcttcaatacttgcaacaaaatcaacttccatcgcaatattacttcgattcatggaatagatgtgctcgttgacagcaggaagcgataagtagcgcttaatatcttccactacttccctagtcgcagttcccgttagtgccagacatagcggactgccaagttccttccatatatctcctagctgtagataatctaaacgaaaatcatgtccccactgagaaatacaatgcgcctcgtccacaacgaaaaggcctacctttgcctgctttaatgcttctactacaacagcattttgcaaaatttcaggagatgcataaataaaacgataaaaagctaaattttttagcgctcgttgtttttcttcttgttgtaggaaactatttaaggcaataactcgcttttctccgcttgcctttagttgttgaacttgatcttccatcagtgaaattaaaggagatacaatcagcaccggtcggttcaacaaataagctgggagctgatagcacaatgattttcctgttcctgtaggcagaaccgctaacacattatgaccggttaaaatatcttgaataatctctttttgtcctattcgaaattggctatagccgaattgtttctgtagaagttgttctatcttcacatcaaacaccactttttttagtatcaggtaaaatgttttgctaatacgagacgaatctgaaaataggtaacgtcgtcttttacttcttcttttatcacctttaatttatttgtacgcaaaccttcaaaagctgagataattttttcctgctgcttaggcgatacgtatgcatcgattgaaaaagatggaacaaacagagctaattctgcaatatgatcttcaattgtactttctttcaaacgccttatataagcaatttcttcaagcgtcttgcctttttgaagccagctatacgtttttaacgtcgagcttgtcaaaggcaattctaaatatagatcacgtaaaaaagaagacagtacatgaaagctttcattatttttacttactttttcaatgatatggtgaataacccctaaaagttgaatatgaacataatgctcatcgagttcatattgatatgctaactgattttttgtaaagcctactctttggtatccagtcagctgcaaaacaaaaagagacgcgtcccgttccgtgcaacctttcaaacacattcggagctcttcgaatagctcggcggctaactcttgacgcgtttgcttttgagacataatatacgttttgacccattgaatgacctcggcatttttggaaatgggtaaaaaccctttttgaaaatactgtaggtttgataaggtctgaatgaacaaagtgattcttgctaaaaataattgagtactgcttgcgaatttccatccgtctaaagctggatgaaagggtcgagccgtcagttcaccttcaaggcgtgcttgtcccttatctgtcatcacatacttttgattttcagtttcttcaatatactgctgttcttttagatatgcaacgcaggtttcaaaagaccgtttatctaagtaaacaaatgactgaaaaagaaacgaaattccaaaaatttttccgtcttgaatcgtttgagctgactttttacctgttaataaatgataaataccataggcggttcgctcaccttttaactgttttatacaaaataaaatgctaacttgaatataattcaaaggtgtcaacttcctttctcattcattgtaccaaaagtgaccaatagcatgtgagataaaggctttttagctctttcctttatgtatcaaaacgtttgggtaagtgaagaaaccttgatttgataagcattctcagtgacttttctattgaaaagttttataaatcattttacaatgaataaggagaaatttcactcttgattcgccaagagattatataatgagaaattttcgaacactttacaggaggtcttgttatgccaaaatatacaattgttgataaagatacttgcatcgcatgcggcgcttgcggagcagcagcaccagacatttatgattatgatgatgaaggtattgcattcgtaacattagatgataaccaaggtgtagtagaaattccagaagatctagaagatgatatgatggatgcaatggaaggctgccctacggattcaattcgcgtagcggatgaaaaattcgaaggcgatgctaataaattcgaataagtatggagcaaacctgtagtgtacatgctgcaggtttttttatatataaaaatcgctctccccgggagagcgattgaattaaacagcaatgcgacgtgtgatccattgcttcatttttgaaaacaataagacaaagataacccctgttgctgctccttttattaagttaaacggcaaaatacctgcaacgatatattgacgtgcttgttcactagacatttctggcgattgcaagaagattgtatacgctggtaagaagacataataatttaagacagccatgagtaccgtcattaccaccgtacccgtaaccaaacctatcgttacacctttagctgttttaaatcggttgaacatgtatgatacaggaagaacgaacagtaaaccagccacaaagttcgccacttgaccaactggaacccctgtagcacttccttgaattaaataattcaataaattttttattccttctactataacagcagccatcggtccaaatacaagtgctgctacgagtgcaggaatttcgctaaaatcaattgttaaaaacggaggtaatccaggaattggaaaattaatcatcattaaaatataagcaatactacttaacattcctagtatgaccagcttttgagttttcttactttgttgcatcttgcctctctccttctttgtgatccactcttcaaagaagaaaggttcaactttatatccccacgcaaaaacctcccaacaaatgattcgttgagaggagacatggcaggcatatttaataaacgttcatcacattaggttttgaacgctgaacctccaccttctcccatccagactgtactgtcggctttggaatttcaccaaatctgctcgtatgtattacatataagctcgcgggctcaaaacaatttgttttttaccgccggtcgggaatttcaccctgccccgaagatagaccaatatttaattatgaatttattatatgttatctcgaattaaaagtaaataaagaagttttttaattcctattaaattgatgtcttttataaacttcattactgttttatatgtaaaataaggaaataagtgcataaccaacagcattataacatatttatagtttcaattttacgtttataattgtgtatttgataactaatcgtaaagtttgaaaaatataattgacagaatttttttaacatggtaaattatcaaatatttgatgatagtaaaatccaagggagatgttcacgtcatgtataatgtattagtagctgattcaattagcaatgaaggtcttgctccactacttgaagctcctcatgtgaatcttacgcgaaaaaaagttgaagaagttgagaatgatttgcatacgtacgatgcgcttttagtacggagtgctacgacggttacagaggatttgctggcaaaaatgccgaatttaaaaattgttgctcgcgctggagtaggtgtcgataatattgatattgaagcctcaaccaaacgaggggttgtcgttattaacgctccgaacggaaataccatttcaacggcggaacatacatttgctatgatggctagcttgtttcggcatatcccccaaggaaatgcttcagtcaaagcgcgcgaatggaaccgctcagcatttgttggaacagagcttaatcgcaaacacctgggcattatcggatttggacgaattggctcagagcttgccaaacgcgcaaaagccttcaatatgagcgttcacgtttacgatccttttttaacctcttcccgagctgaaaagctaggcgtagaactattatccctggatgaattactagcagcagcggatgttattaccgtgcacactccacttaccaaagaaacaaagggattgctcaatcgtgacacgttagccaaaacaaagaagggtgtgtttttattaaactgcgcacgcggcgggatcattgatgaaaaagccttagttcattatttagaaattggccatgttcaaggtgcagctattgacgtatttgaagttgagccgccgattgataaccctttgttacattttgatcaagttattacaactccccatttaggagcttctacaaaagaagcccagcttaacgttgctgaagacgtggcacatgacgttttgcgttttctagaaggtaatcctgtaagctcatccattaatttaccaacgctttctaaagaagtttttgaaaaaattcagccgtttacgagccttactaaacaaatgggagctatcttatctcaatgcatgcgagaacctgttcagcatatctctatctcctacggaggtacagtgacggatttggaaaccacttatattacacgaagcttattatcaggctttttaactcatcgtatcgactcacctgttaacgaagtcaatgcttctatgattgccaaagaacgaggaattacatttggtgaaaaaacatcggaagatacgcaaggatattccaatatgattgacgttaccgtaacaggcgaacagcgtacatttaccattacgggcacctatatagccggctatggacctcgaattgttaatattgattcgtttgatattgatttttatccggaaggacatcttctttatatccgtcatagtgatcagcctggagttattggaaatgtagggaaagtacttggagatttacgtattaacattgctaccatgcaagtgggccgtaagcaaaaaggcggagaagccattatgatgcttacgtttgataaacttttagatgattctgtcatcgcttcgttaaaacaaacaaacgaaattgtgaccatacagcgtattgaattgtgacattgaaaaaaagagcctgagcggctcttttttttatggacttatttttaacacttgtcctgcatttaacatcgtattttctaaatgattccactttcttagctgatccatatctacttcatatttgactgcaagctcagataatgtatctccttgatggataagaatacagttatcagaagtctgatgtaactgctgaaaaaccgtggcagctaaatcgctttttacgtatgcagatagtttttgcttgtccaatttggcaagtgggtttactgcattggttttatccggattccaccttccttgatgaacttcaaaatgcaaatgtgcacctgaagatcgccctgtattgccaactcgtccaatgttttgacctgcggctacacgatttccttctgcaacaaaacgttcctctagatgagcatagaccgtttcgtatccatttgtttgtttgataaaaacaacctgtccatatgtatttgaataataagagcggctcaccactccttttgcaacagcatacacctgtgtaccaacaggtgctgctatatcaattccaaagtgtttggcgtgacgtgaaccaaatatatcagttaagactccttcaaccggccactcccactgcttctcttctgcttttaccatttgcccgcccaaaaataaaagacctatacacaatcccattactaatacaaccaatattcttcttaacacgtcaatcatgaagaaagaacctcctatgtagatcattgcacacaaaacatactatatgccaattccttctcttttagacttgtttatagaaaaaacaaagagatgtgattctccactgaatcacatctctttgttattcttattatttcagccgaacaagctgttatttagcatgtgtttactttggcagtttgataaagaaagttgttccttcatttaattcactttcaaccgcaatgatcccttgatgtgcctccacgatatttttggcgattgcaagcccaagaccagttcctgacttccctcttgttctggctttatccgctttataaaatcgttcaaatacaaatggaagatcttctttcggaatgcctgctcctgtatcttgaacagaaagatggatttcggattgacttttatcaagatgcagctttacttctccgtagtcatccgtatgacgaatagcattatcaattaagtttgtcagcacttgttccatacggtctgaatcaatcatcgcctcaaattcatcttctacttttccattaagagacaatttaatatgtttttctttagctaacccttgaaacttacgcaaaacacgttctgtaaattcaaccattgctacagattctaagtgaagctgcacatgtcccgcttccattcgcgccaaatctaaaagttcatttacaagccggcccatacggagtgattcatcataaatcacctgtgcaatttctttcttttcttcatccgtacttgcaatatcgtcaataatagcttcactataaccttgaagcatagaaataggtgtacgcaattcatgagacacgtttgcaataaaatcttttctcgatttatcaagtttacgctcttcagacatatctcgtagtacggctacagcaccgcgaattttcgtttgattatagagcggtgacattaaaatgacccatgttttcccttgaattttcaattctgcacttcgctcggtttcagtctctactaccgtttgaaacaaatggacaacgtttgctggaagctccggcacctgctgattgttgacatcctgctcataataccaagtctgaagaaaatgctccgctggggggttggtaattaaaatcgatccgtctctactaaacgtaataacaccgtctgccatactgcttaaaatacttgaaagctgctctttttcctgattaagcgcattgaggttaaactttaactgcctgcccatttgattaaaagcaatcgctaactctccaatttcatcgtgagttaaaataggtacttttgtatcaaagttgccttttgttacttcaaatgccgcctgcctcatttttctaagaggcgctgtaattcgagtggataagaaaaaagcaaagatagtagttaaaataatagcaatacctgcagccaataaaatgaacttagtcgtatactgagcgggttcttcaatttcagaaagagattgatacaaataaacgccgcctgtcggtttgttatctttcattaaaggtacaccgacaacaaacattaaaggttcatcactcgtgtctttctttgtggtcatgtacattttttcccgtattactttacctttttcaaccacttgatttagctgatcgttttgtttaacaatggccgaaatagctttcttattttctttatcaggatgggtggaatgccaataaaaatctttgtcttgaacaataactacacttgcttggtctgcaagttcacgagcaatggatagtcctagtttttcatcgtccgtttcctgcacaatggtagagattttagcagctgttttagttaaacggttttctgcatctacaacatgataattttcaaaaaactgaagcaataaaatagtcaaaataaataaaacaagcgtgacgagcaataggatagtaaaccatagtttaccaactacacttctccaaaacatcagttattttcaacctcaaatttataccctactccccatacggttacaatcattttcgccgcttgtgacgatacacgatttaacttttcacgcaaacgcttgacgtgcgtatctaccgtacgaagatctccaaagaaatcataatgccatacttcacgcagcagctgttctctgtcatatactttatctggcgtttttgcaaggtagcataataattcatattcttttggagttaagttaacttcttttccgtctgctgtaacgcgatgtgcatcattatcaatcgttaagtgatcaaagacgataagatttttcacgctcgtttctggttgaataaacgttgcttgagaggaacgtcgaagcagtgcttttacgcgaagaaccacttctcttgggctaaacggcttaacgatataatcatctgtacctacttcaaacccttggactctgtttacttcttcccctttggctgtaagcatgataataggagttgcttttttctcccgaatttgtttacaaacctcaataccatctatgccgggcatcattaaatccaatacaatcaaatcatagtctatgtgtaacgctttctcgattgcttcatgcccatctgctgcttcttcaatgatgtatccttctttttctaagtacatttttaacaatcgtctaatgcgatcttcatcgtctactagcagtaatctttgttcgttttgcatgtattttcaacctcctagtcttagtgtacaaaaaaaaaccagcgagttctacttatgatacccaaacaatgtgacaattcgtgaacacctttacgaaaaacagctgtttttaccaaaaagaggttgagacgcaacgaaatccatgcaatctacagctgaataaataaaataaagaagctagtagggatcgcttgttccacggctataagcacctacatacacgaactttgcgttcaccatctcaatgaaaaaatccgaacgaatgagattctccatcaagaagctcattcgttcggatctttcttcaactaaaatatcttcgtttcaggctctatgctattattaaaggttacgcatatgaatgtaaacctgcaataattaggttcacagccactaagttgaacataatgatggcaaatccgccaactgccagccaagctgatttttcaccgtgccaccctttcgacagccgaagatgaagaaaagcggcgtaaaataaaaaggtgatcagcgcccacacctctttagggtcccacccccaaaaacgcgtccaggccatctgagcccaaatcatagcgaaaataagtgctcctagtgtgaaaataggaaatccaatcgccactgctctgtagcttacttcatcaagcaagtcgctgtttacctgtttcacaagcggctgcagcgcagctccaattcgcttccgtaaaataagacgaatcagccaatataagacgaatccaccagctaacgaccaaatgaccgtatttaattttttagcattgataatagcgggcatatcaataagcggctgtatatcgttcccatctgtccattcactttgatgcggccccactagcggaaccatatgatacacggcttgctcttgttctccacttttattaatccaattaaatgatgactcgtagtgtgccgcattaaaagccagcgtcaccgctacaaacccaagagtactaataagcgtatacaggatgaattccagccaaaatgcttttttatttcgcttggattggtcaatcgttttgattaaataaatcaatcctgcaacaaagctaatagaaagcacggcttcacccgtagctgcggttgtaacgtgaatatgcagccaattcgtttgcagagccggtatcagcggcgtaatttcagttggaaacatgcttgcataagcaatgatcaaaagagccaccggcaatgcaaaaagtccaagcatgctaagacgataaataaagtaaataacaataaatgcgccaacaagcatcatgccaaaaaacgtcgtaaattcaaataaattactaacaggagcgtggcctgatgcaatccatcttgtaatgaagtagccaatctgtgcaataaagccgatgatggtaaccgcaattccaaacgttgcccactttgttttcttttgagctgctctcttatctcgaatagctcctccgaaaaaaaaggttgcaactaaataagcaataaacgccacatacagtaaattactacttatactcgcgtaatccatgctttttcctcctattttgtttctttatcattttggtccttcagctgtgtaagggatgttgattctaataaaccatttagttcttttttaagcccataccagtttttatttgtatgtgcggccaaccatatctcattattgactttttgaatccacatgcggcgatgattccaatacatcccttgaattacaccaatcataaagatggctccgccaactcctaaaaaccaaagcgtatagtctctgcgaacagttaatcccgttacatttttcgtttccacaccagcaaaggtcattttataatcgttatttcctaggggctccaagttctctctaattccaacaaaagcaacttcaccttttttatgctgaggggtaatcattttaaatacaaaagccggattgttaggcactctggtctttgtatttggatttccttcatcatcaaagaaaaagtctggaaagtaactcatgagcttgactttatatccgttttttagatcatatgtttcttttggattatgtaaatctactgtaagtgaaccaacgtttctatttgcatttttatctgttaaatggaaagacatagagctaaattcatttaacttgaaatccacttggtacatggcatatccttcaaacttaagcggctgattcacacgaatctctgaatcttttattttctttaactttggatctgctcccggtataagctttccttcgcgcttatacagactaacatccgcttcatattttttggctactttattattccctgcacgatcaattgcttcttgaaacacagcgttttcgctatctttatcatacatttcaacagtaaaacgatggtttttcaaaaaatactctccgttcgtcccaggaataacttttgtttcaccttcacggatccaaagaacttcatctatatacatacctggtacaaacctaagcatagcacctagtaaaaagataatgagaccgatatgattaacgtatggaccccatcttgagaagcgtcctttttcaaccagcagattgccgttttcttcacgaatagagtatcttctttttttaagcatactttttacatgttcataatcttgatccgtccacgatgatgaagtggtatataaacgctgtctttttaagaagtttggatgttttgttacactctgcctttttagagctcggtacaaaggcactactcgatctaaactgcaaatgactaacgacattcctaaagcagcaattaaaagcaagtaccaccacgattcgtagagatgatgaaaacctaacttataataaagctctcctgtccatccatattccttttggtaatactcatctgctgtcacattaggaggtatgtaagcttcttgaggataaatggttccgactgcagacgcaacaagcgtcacgataatgatccaaatacctacttttacagaagagaaaaagttccatattttatcgataactgttttattgtacgtttgcgatcgccttgcgcttccttcataacgcatatctactaatttatcagttgtttcttctgcaatcggcttaccacaggcttcacacaaaatcgtaccatgcgggttaacgtgtccacattcacattttacgtgtttcattgtcaacactccctatggtttaatttcttccatatattcttttattttagattcttccaatcccccaataaaactgtctacaatctttccgtttttatcaattaaaaatgtagtcggcagaggatctattccgtatgcacccaacacttgtgaatctttatccatcaaaatcggaaaagatagctcatactgtttagcaaattgctctactgctatattcgtttctgcaacgttaacagctagaatttcgacaccttgctttttatatgatgcatactgcttttccatagccggcatctcttgtttacagggcttgcaccatgttccccaaaaattcaaaaaaactcctttgcctttgtaatctgatagctgatgagtttctccattaacatctcttaatataaagtcaggtgccttatctcctactgataccttttgtttatcagcaaaaaattgagcataaagggtatatccaaccgcgcacagcaaaactgccaatataactgttcgaataatcaagcgcttttttttcatggcatgaactccttttaaccgctttcaatacgcttttttctaccattatatcatttttgtggtagtggctttccaataatatttcgacgtttctgtgaagtcttcctctcattctacaagttcgacattttttcaaaaaaccttgcttgtttttctaattcacgacatttttcataaaaaaaacaggtaagtgaaaattacttacctgtttgagacattgaatataattgtttgacttcatgcgctgtaagctcacgagcttctcctgcatttaatccgcgtaaatctaaaggtccgtagcgttcacgttttaattttaagacagaatgcccaattgcatcgaacatgcgacgtacttgacgatttttcccttcatgaatcgtcaattccacaatcgccgtctgcttgcttttatcaatagaaagaacttttgcacgagctggtgctgtttttccgtcctctagcatcacaccgcgctgcagctgtctgattttttcacgacttggaattcctttaattttagccacatacactttgtccacttcaaatttagggtgcattagctgattagcaaattcaccgtcgtttgttaaaagaagtaaacccgacgtatcatagtctagacgtccaattggataaattctttcttctacatgtggaaagaagtcaacgactgtttttcttcccttgtcgtcgttagcagctgaaattatgcctcttggtttgtataacataaaataaacgggcgcttcgctttctacaggcacttcgtctacttcaattttatcgttaggacctactttcgtgcccaattctcttacaacttttccatttactttcactcggccttggccgattaattcttcagctttacgtcttgatgctacacctgcgtgagcaatcactttttgtaatcgttccattaacacttcacctcttgtaacatcttacttgtttacgaagtaatacacaagtgtatttgccacccagaggtagaattttcgatttcttaccggccaaacacaaggattacaatgacaactgaggcaataattcctaccaaatctgccagtagaccaaccttcagcgcatctcccatttttttaatgccaaccgctccgaaataaaccgttaaaatataaaatgtggtatctgtacttccctgcatggtcgatgccaaacgaccgataaaagaatcaggtccgtatgtagaaattagatccgtcgtgataccaagagcagccgttccagatattggtttgataagagctaaaggtacaatttcagccggaacgccgactgcttgcagcataggttttaaaacagataagaaaaaatcaagcgctcctgaagcccggaaaatagagatgctcactaacatgccgactaagtaaggaatgatggaaaaagcaatttgtaatccgtctttccctccctctacaaacttttcatacgtaggaatttttttataggttccataaagtaaaatgcatcctacgataagaggaataaacatcaatgatacttgattaagcatagtcattttcgttttcctccttttcgtgtacgtcgataataaaagaagcgatcaatgatgatagctcctatcgtagctacaacagttgctaaaagcgtggtaccgacaatttcagtaggattagccgagttatacgtaatccgaatggcaataactgtggttggtataagtgttaaactggttgtgttaagtgctaaaagtgtgatcatagaacggcttgcttcgtctctatcgccgtttagctttttaagctgctccatcgctttaatgccaagaggagttgccgcattcccgagcccaaacatattcgccatcatattggacaatatataccctaaggccggatgatcttttggaacatcaggaaaaagtcttgtaatgatgggtcgaaacagtttcgctaacttgtcgagaagccctgcactttgagcaatattcatcatccctaaccaaaagaccagcacgctgattaacccaatgctgatggtcactgcttcgcctgctccttgaaaaattgctttgtttacatcaccaatttttccatttataatcgcaaaaacaattccgataatggtcagcagcatccaaataatattaaccatctgttttggctccagactgaataaacattaatcgcttcactttatcaaaaaaacctttttgctgctcggactgcttttcgaaataaattggaacactgtcaatcgtctctccacttctataaatatcgagctttcctaccacatttggaacttcccctgtttctttccactgctttttaggctgaattaacgttgtttttacttctacagagctttgttctttctttgtgagcggatagacgacatttcgtttaatatacagctgatctttatagaaagaattttttatatcggccaattctccttttgaagctaaactggtcatatcatatttatcaaatgcattttcatacatggaaatgtgatcgttccaatcatctggagcattaatcgttacggcaattaaatccattccatcttttgtagcagttgtcacaagcgttcgttttgctaattttgtataccctgtttttccgccagtacagtatgcatatagtgttgtcagcagtttatttttgtttttccacactcgatcccatttctcttcaggatgcttcattcgatagacttttgttcctgaaatctctttgaaaattttattattcattgcatagcgcatgagcagagccatatcgtgcgcggttgagcgatgattttcatgatcgtctaatccgtgcggattttgaaatgttgtatttgtcatgccaatttcttctgcttttttattcatcaaataaacaaatccatcttcgcttcctccaacggattctgcgatagctacagcagcatcattacctgaacgaagcatcaagccatatactaaatcttttaattttattttttcaccttcaactaaatacacagaagaaccttcaacaccaactgcgctgtggctcacagtaactgttttatttattttgccagattcaatcgccagtattgctgtcataatttttgtaatgctagcaattcggctaacttgatctgcatttttagcatataacactctccctgatttctgttccatcaaaatagcactatgagcacttacgctccccgctgcagatgatatggaaggccaaccgctgagacatagcaatacaataaatagatagatgatactttttttgcttcttttcatgtcatccccgtccctctacctgtttgtacaagtttatgctcgtcttttttggttatgaatgaaaagatttgtccatacaaaaaagaacatagaaaaaactctatgttcttttacattttcacttcatttcttgaaacgattgaaaaaacaaatctgcttcttgatcggttccttcttgtaataaatcttctggaagcggcggcagctcttcgatacttttaaggccaaaatagcctaaaaattcttttgtcgttccgtataagatggcccgccccgcgccttccgctcgtcccacttcctttaataaaacttttccaattaaagtttgaagaggtctttccgttttcactccgcgaatctcttcgatttcagctcttgtaattggctgcttatacgctacaatagctaacgtttcaagcgctgcttgtgataatgattgattagcgggagcttctacgagcttctcaatatatggtgcatagtctttttttgtgacaagctgataggcccctcctatttcaacaagtgtaactcctctgaacttacactcttgctttaagctctccaaagcaccttgaatgtcttcatgaggcttttctataatctcagctaaccggctaatagatagaccttcatcaccagaaacaaaaagcaagctctcaataatagcctgtagattattcgttgtcattcctcttcattcctttctcgatacgatacataaagctcgtctagattgtgctgctgttccacaacgatttcattttctttcattaattccagcacagctaaaaacgttacaacaatatgatcacgctcttgataaggaaacagctgataaaaactttttttccctttaaaggcttttaattcattcacaatttcactcatgcgcttgtcaattggaatgtcttgccttgctattttcgtctgcataggctttttattttgctttcgtttcatcaacttttgaaaagcacttagcatatcatacagtgatatatccaatccttcatcctgaggctgcgtacgttcttctgcatttatttgcacattacttggaggttttgtatacacatgactttggtcttcttccagcttttgaagctctacagccgcttctttaaactttcgatattcaattaagcgctgcatcaattcttcacgcggatcttcttcatcgaccatttcaatttcatccatatcttcttcatacgtaggcagaagcattttacttttaatttgaagcaaagttgctgccatgactagatattcactggcaacgtctagctgaagctcattcattgtatgtataaacatcatatattgctcagtaattgtcgctactgggatatcgtaaatatcaatttcaaatcggttaatcaaatgcagaagaagatctaaaggtccttcaaacgcatctacttttacactatactccacttttatctcaccaacacttttcaattgcttatcatttctgctgctttatataacgttactatcattagtatagaggattatagacacatgtccaatacaaattaacgtaaaaataggtcatttgcccatacaaaaaattcaaacatacatatgatgtcaaggtaataagattttgaaatggctgaaggaggaactcgcatgggtgaaaaatcttgtggatacggtagcggtttcgctttaattgttgtactgtttattttattaattattgttggttgttcttgcttacgcttctaaccacacatattgaataaaaacaaacgtgttcaccataccttgagcacgtttgtctctttaaaggcaccgcgctgatgaatagctaatttttgtgatacactacatatagagccttaccaggagggaacaagattgtattcacaagcctatattgattatttagttcattttcatggcgaccgggattactttgaatgtcatgaactgctagaagaacactggaaaaaagacgaaagaggacaccgcaatattatttgggttggccttattcaaattgctgtttcactctatcatcatcgacgccaaaatttcactggagccaaaagaacgatgcaaaaggcgctggcaattttaacgaaggaagaagaaaatattacgcagcttggacttaattatctttcactgcttaaacttcttcgcaaacaattagctttaatcgatacctatcagccatataaaagtattaacttgcccattgaagatccagcattattacgagcttgcaaacaaagaagcactgataaacagcttgtctggttatcagcttctaatctgcaaaatgatgcgattgttcatcgtcacagcacgcgagatcggtcagatgtgattgcggaaagacaagcgaacttattggcaaaacaaaacaacaggtagcttctagctacctgttgttttatgatgactaagatgtgaaagaagctttcacacctcacctaatcatgcttttttttattcatccgcctgacacttttcataaaacggagcgatgatttcactcggcttaatttgtgcagtcgtgtacatttctttaagagctttaatcatttttttgccaataccctgttggcggtgtgaagggtttacactgacgtgttgaacctcaatcaaacttttatcgagcatggaaatgccaacaatcccaataatatcttcttcttgcttccaaagatacagctgccaatgttcgttttgctcatattctttcatcgtttgttgaagtttttttaaatctttttccgtaggtacaaacgatagaagacccatggcaattttttcatagtttcgtttatagcgaataagcatacgattctccctcgtcctcaaactttcctacaaattaatgcgctgcgttttttactgcttttatcatacaaaatttataagtaaatagcaatattacacaaaagcttgtcctatgtcatgcgtgtatgagaaacctaatctattacgctttttgagctgttgcgcgaagaaaaaacgccgtaaccccctataaaaggttgttatgacgttttatcagctaatatccatttatagcagtatgctcttattcttcccagacttttacttctttcattacgtcgccatttttcatttttaacactgtatcaagtccttctgttacttttccaaatacagtgtgaacaccgttcaaatgaggctgtggctcatgaacaagaaagaactgactgccgcctgtgtctttaccagcatgtgccattgatagagaacccgcttcatgtttgtgagggtttccttctgtttcacatttaattgagtagccagggccgccagcacctgtaccagttgggtctcctccttgagaaacaaatccagggataacgcggtggaacgttacgccgttgtagaatccttcattagctaacttttcaaagttttctactgttcctggtgcttcgttaggaaataaatcgattagaattttttcgccattttccattagaatacttgcttttttcatataaatgacctccaatatatgtattagtaccgctataggctctgtttcccctatcaaagcggcaaaacgtaaaagctgtaagtgccacctagagtagaacacttacatttataaactcactctattctactacaaacaagctcatgaattcaatgaatgcacttcttcactttcttctcgtagggctctaaataaaaaatagtagttgtgagatgaaactttttatagtatcatccgtctaatacagtgatagagatacatagatttcatttcatatagaaatctacgcctctagactgatttatgggaaaatgatgaattgactctgttacttcagacctgcccgtattataatagggcaagtatgggattaaaggaggaaaaaggtttgaaattaacgataaaagcaatgatggtgacattaggtcttcttctattcctaaccgcacccttaaaaagttttgcagatgctgctccgggcgatgttattattacattaggtcaggacttaaccagctctcagaagcaacaagtattaaatgaccttgatgcaccaagcaatgctcaaacagtaaccgtgacaaaccaagaagagcatgaatatttaggtgactttattccaaaggctactattggatctcgtgctatttcatcttctagtattacccttggttcaaaagattcaggtttaagcgtatcaactcaaaatattaatggtattacagacgacatgtatattaatgctttgatgaccgccggtgttaaagatgcaaaaatccagattaccgctccatttgaagtatctggtacagctgctttaacaggtattatgaaagcatatgaagttcaaacagatcaaaaaatcccagaagaagtaaaaaaagcagccaatgaagagatggtccagacctctgagcttggtgaaaaaatcggtaaagaaaaagcagcgcagtttatggcaacgattaaagaagaaattgccaaagaaaatcctcaaacaaaggacgatttacgcacgttaattcagcgagtggctgatgatttaggtattaaattaacagattcagagcttaatacacttgttgattttttcaatcgtttaaaagatatgaacatcgattggaatcaagtaaaagaccaactttccgcgacaaaggaaaaagtaacaacatttcttcagtcagaagaaggccaatcatttcttgataaattaaagcaattctttgttgatattattaatgctattaaatcgttattctcataaaaaaaagagcctcttgaacaagaggctcttttttacgttaatcactcgttacttttttaccgtcactttgtatttcacatcattttttacaaggtcttcatacgtttcccgttttacgactaactgtgcttctccatcttctacgaacacgacagctggctttggcaaacgattatagtgacttgccatagaataaccgtatgcgcccgtacaaaacatcgctaataaatcatctgggtttgcttttgggagttgtacatcccacatcagcatatcccccgattcgcagcacttacccgcgatggacacgagctcatcactttcatcattcattcgattggcaatgaccgcttcatatttcgcttgatacagcgcaggacggatattgtcgttcattcctccatcaatcgctacatattcacgtacattaggtacatgcttacgagaaccaattgaatacagggtcgttccagcatctcctacaagagatcggccgggctcaatccaaatttcaggaatttctacctctaactgtttggactgctttttgacctcttctataataacttccacatactgcgaaacaggaataggctgatcttcttccgtataacgaatgccaaagccgccgcctaaatttagtacttgcggaacaaattttatacgttgtttccactctttcatttttgcaaaaagcttttgagtcgccataataaatccggttgtttcaaaaatttgagatcctatatgacagtgaatacctaaaagttctagccccttgctattttgtacaagacgcacagcttcgtctgcttgaccgttttgaagatcaaacccaaacttcgagtcttcctgccctgtcaagatataatcatgtgtatgagcttcaattccgggtgttaacctgagaagaacaggcatctttttttgatactgttccgttatttcctgaagcaatgcaatttcatagaaattatcaactacaatgcaacctacatcttctttgacggccatttctagttctgctcggcttttattgtttccatgaaaatgaatacgttctttcggaaagtcacctgctaaagccgtatacagttctcctcccgaaacaacgtctaacgaaagaccttcttcatgaacgacttggaccatggcaattgtagaaaaagctttgcttgcataagcgacctgtgcttttaccccatgcttttcaaatgtttctttaaatcctctagcacgctgccgaattaaagccacgtcatatacgtaaaggggtgttccaaaatttgatgctaattcaaccgtatcaactccaccaatttcaagatgaccctgcttatttatgcgacttgttccgtgtaaaaacatgtttagaccccgttcctgtgtatagtgtaaaaaagacagttaacggcaattcgctgctaactgtctaaatatttattattttccatatttaaaacaaatctatcacatcttcatacaggtttcaaccacatattttgtttaaggttttgcaggctggcggtctttgtcctgcggatgtacaatactaggacgcggatttgctccaggaaccggtgtacgaatgataatctgccataaagcctgcgggttgaatggaagaaacggccacaaataaggcgtattcaatgattttagacgcaccatatagagaatgatacacgttgttgcaataagaaaccctggagtatgaaaggccgccacaaaaattaacagaaataatcgcagcattttatttgccactgctaactcgtagcttggcgttgaaaaagaaccaatggacgcaatagctacataaagaatcacttctggaacaaacaatcctacatcaatggcaatctgtccaatgagtgctgcagcaatcaagcccatcgccgtggcaagcggtgtcggcgtatgaatggcggccatcctcaggaactcaacccctagatcggctaagaaaatctggataactgtcggaatgtttgttgtttcgtttggcccaataaattgcaattttgccggcagcagatctggttcaagtacaaataacagccataacggcaataagaaaagagatgcaagaattcctaaaaatcgtatccagcggataaaggtaccgacagaaggagcctgcctgtattcttctgcatgctgcacgtgatgaaacagcgtagttggtgtaataataacgcttggtgacgtatcggtaataataatcacatgcccttctagtacatgggctgctgctgtgtcagggcgttctgtatagcgtaccatcggaaaaggattaattccttgtttgactaaaaactcttcaatggatttgtcagccataggcaaaccatctacatcgatagcttccagttcatcttttatcagtttaaccagtcctggatcagctaccccctttatgtacccaatcgctacgtccagtttcgaacgttcgcctaccttcataatttcaaaacgaaaccttccgtcacggattcgtcttctcgttaacgctgtattgataatgatattttcagtgtatccatctcttgctccgcgaatcactttctctgtatccgcttcctcaggcgatctgccgggatacgtacgcacatcgacttcaaagccaacttcttcaccgtcaattaaaacgaatagcagtcctgataaaaccgacaccattccatcatccagcgtctttaaaggcttgacttgctgatgaataagacggttttcaacaatatcctttagctttgctcgttcaacttcattatcattaatttgaacgagcacttttgtaatttcaataataaatgaactgtcgcataatcctgttacatagtaaacatgaacttctcgatccaaaataagtagtttacgcacgcccacatcaaaacttgtgttcatactagcgttttctttgaaccactgatcgtttttttgtaccttcgaaaaaattgctgttttctgctctgctagcttacccaaacgaaccgctcctttctaaaataagtcttgctgctttttctgtaataggacatcccagtttaacatcatccatcctagccattttgccgatatcccctattcctacaactaagggaatatcgagctgatccaagcagtaaactgtatctccattaattcgtccgacttctaactcttgaattccgcttttatccacgccgtaatgcgatatttccccaaaacgatcaatggtcacatccactcttgtccattcgctttgatgagtacgtgacgcaacagcaatcactccaagaacttctacttgaggatgctttgctacatggagcaaagcaatttccccaggtccttcctctaagaaaccgctatcgtcaaacattacaaagacgggatcatatggtgcttgaaggattaaatttaccgtttgactacctgttaacgtagtagggtttccatatgatctcgaaatgcatctgccaccaaccgatttagctacatgctcaattgctttgcgtgcatattcatcgccatcggttacaataatgatccttctttttttcataatcttttatcctttcggcttaaagattaacgcgataataaaagcaaataaaatagctgctgaaattccagccgaggtaagttcaaaaatcccaatcccaatcccgataaatccatggtcatccgcttgcttcatcgctccgtgcagcaaagaatgaccaaagcttgtaattggaaccgttgctccggcgccagcaaattcaattaacttatcgtaaagaccaaatccatctaaaatcgctcctgcaactacaaacgaactcataacatgcgctggagtaagcttagcaagatcaagcagcagctgcccaataacgcaaatgattcctcctacaacaaaagctattacatactccattgatcatccccctccccaatatgttctaagacgacgccatgagcaattgttggaattgactctttttgctgaatcatcgttggacttaaaagagctcctgttgctaccataaacactttctttaagtttcctgattttaattcatttaaaatatgcccatacgtgacaatagcggagcagccgcagccgcttcctcctgcaaatacattttgatcaggacggtataccattaatccgcaatcattatggttggttgatatatcgtagccttcgtccttgagcagctgttttaagattggacttcctacaccagataaatctcctgttaaaataagatcatactcgcttggagcaacgtttaagtcttccaaatgtctttgaatggtatctgcagcagctggtgccatagcagaacccatgtcgtttgcatttttaattccataatccattacccgaccaatcgttgcagaagtcagacgcacaatacctttttcttttgagaccagcgctgcccctgctcccgtaatggttgccgttgctgtatctggtttttgtcctccgtactcggtaggatttctaaattggcgctcagccgttgcgttatgactgctcgctgatgcaataacacgattagcaaaccctgcatctacaagagctgctcctgttgcaagcgtttccattgatgtggagcaagcgccaaacatgcatagaaatggaatttggttatgccgcgctacaaaattagccgttacgttttgatttaataaatctccagccaaaaacaaatcaacgtcttcataggataaatttattttttgcaagcaggaatcaatggactccgtcatcagtcttctttcagccaactcccagttgtcttcttcacagtgcaaatctttatgtgtaatatcaaatgtttctcctaacggtccatctgcttcttttggccctactgctgttcctgtcgcattaatataaataggattttcataaacccacgtttgttttccagtttttctcataatccccctcttttcatagcaaataagttttaaaaaggtagcgaataattcctacaatgtaagccgaaaccgttccaaatacaatgacgtttccagccagcttgaacatgtttgtcgcaactccaagaacaattccttcacttcgatgttcaagcgctgcactcgtcatggaattggcaaaacccgtaacaggaacggctgaacctgcacctgcaaattgaccaatacgatcatatatcccaaacccggttaagagcgcagatattaaaataagggttgcaacggtaggattacctgcatttttttcattaaagtcaaaaaatgcaatatagaaattttgaattgcctgtcctaatgtacaaatgattccccctaccaaaaaggcttttaggcaatttgccacatatgaaggtttaggctgaaatggtttaatgctttcttgatagttatcttttaatttttgattatttgccatgttacatacatccttttcttattgattaacaaaataaatccaatgaaataatgatccgcatactttgcctagtacaatggccattaacaataaaataagcttgccttccattcctattcgtttcgttaacgtcggcaatacattaagcacttctgttaacgctgctgccagcatcccaataaaaataccgctggttaaacctatgatcataataagcaaccccggaaactgccacgtgtattgatgaagactgcaccatccgcctgtaacagcaccacctacgactccccactcatatgcttgaatgtatttcatggttttagtcagctgcattaaacgcgggatgatgcccagcaccgttaaaaatgctacaaacccagcacctgcagccagtcctcccgcaagtccaattacaatggtcatcacaatgttaatgatcatcaatttttttcatactttctttattctcgtgcataatgacgtattgatctaagtcttgctggtaattaaacatttcgacttcgagaggactaggctcttcattaattcgttttctaaagacatggttaaaaaacagaatcattcccaggcctaaaccgatagagtaaggcacttgaatcagcaaaggctgcttatctctcagaccggtcagcatgtaaaacaatttttgatgtacttgtctcatgctcacatcttcgtgaaagttcataattgccaaagcagctccgatgaagagaagaaaccaaacagctagaaaaaacaaaaaggaatattgtttctttttatacatgacctctacaatcgtttgagcgggtccaatcgtctgaatgtctaaatgcggataccgagaggcaactttttcaattaccttcattaaatcaacaatgataatatttcgatcactcatacttacttgatatacaactagcttttcaatttgcttttgaacagaatctcctgctataaccattgctaattgtccaatatttacagcttcatcaggttttacttgaatacgatgtctcattttaagataaagaacgttttccattcatatcacaccttacgattcattatctccctgtacgtgtagtatggattttcttaaattttctaattcacgtttctgaacagaccattaattaccaaataaaaaagcaatccgtttcactattcttctttgaatagcaaaacggattgcttcttaagtattacgtatcattcatatgcagcttcatttgttttaagattttcttctcaagcctcgatacctgaacttgagaaattcccagccttgcggccacttcggactgagtttgatctttgtaatacctcaaatagacaatgagcttttcacgctcatcaagttcttcaattgcttcttttaaggcaattttatcaaaccacttcgcttccgtatgatcagcaatttggtcaagaagggtaattggatctccatcattttcatagacggtctcgtgaatagacgaaggagcacgattagcttcttgagctagcactacttcttcaggagtgagatccaaatgttctgcaacctcagcgactgtagggacgcgtccaagtaatttggaaagctcgtcttttgccttacgtattttattgctcatttctttcagagaacggctaacctttaccgtgccatcatcacgaataaatcgctgaatttcaccaataatcattggaacagcatatgttgaaaatttaacatcatacgataagtcaaatttatcaacggactttaatagccctatgcacccaatttgaaataaatcatcgggctcataaccacggttaataaaacgttgaacaaccgaccaaacgagccgcatatttttttggacgattgtatctcgtgcaatttgatcaccttgctgactgcgcttgatgaggtctttaacttcatgatcctttaaatacggttcgtttttattttttttgacctccacatccattggcaagtctccttaattacatagcgctttactatttgttaagtgcttttttaaatataaggtcgtaccttctaatacagtagactccactcgaatttcgtccataaagttttccattatggtgaaacccattccagaacgttctagatctggtttggttgtgtataaaggctgcttggcttcatccacgttatcgataccaattccttcatcacgaatcatcagctcgactacaccgtcttcatgaagcgtcacagaaatatataccacaccatccggattgctttcgtagccgtgaataatagcatttgttactgcttcagatacgactgttttaatttctgttaactcatccattgttggatctaactgcgtaataaatgatgctaccgtgacgcgggcaaacgattcattttgactaagcgcggaaaattggaggttcatttgatttttcattatgccacccccaatttttgaagcgcgttttcttcattaggttcaaaacgaataattttaaataagcctgacatattaaacaaacgttctacggcgggagaaatagcgcatacaaccatttccccgccgttattatgaacctgtttgtatctccctaaaataacccccaagccagagctgtccataaaggttaaatgctgtaaatttaaaatcaaatggctgatagattccttctctatcgcttcggtgatcttgcttcttagctcttctgccgtatgatgatctaattctcctgttaatcgaaccaacaagacatcttgtttgaattccaattcaatcgaaagactcactatacaaacctcctcggaaatcttatagtcagtctttcgctgccgacagaatagaatccttctcaccgacaaaactagttctatttcgtcacatttagctgtttaagatgtttgagagaaaatagagaatgtacgtttgaatatcttccaccaagaagcagcatcaatatcttcttttgcaagaagcggtgaagaactaactactttgttatccttcttaatggtcaacattccaattttgtcgcctttttgaataggcgcatttagcttctcgttcattttcacttctgttttaacgtctttggctgcatttccttttttcaataaaaccgaaataggctcggacgtaacagctgttacctgatcttcgctacccttgtttacatctatcttggtaataacgtctccttttttgtataaaggcttcgttgtatattgactgaatgcgtagtctaacattttggttacttgattattgcgatcttttggcgtgcttgcaccgaatacaaccgctaacacacgcatatttccctttttagcggtagctgtcaggcaatacttagcttgacctgtaaatccggttttgagtccatcaacgccgggataaaactttactaagcgatttgtatttactaaccaaaacttcttatctgtatccgtgcgcaaataagcttcgtatttacttgtatagttaataattttttcatactttagcagctctctgcccatcatggccatatcatgagctgtactatagtgattttctacgggcaggcctgtcggattttgaaattttgtatgagtcaaaccaagctctttcgctttttggttcatctttgctacaaatttttcttctgatccagctaaatattcagccattgccatagaagcatcgttaccggaacctatcgcaatccctttcagcaaatcatttaccgtcatttcttctccgggctctaaaaagatttgtgagcctcccattgaagcggcatattcacttgcccgcactttatcttttaaggtaattttccctttatccaaagcctccataattaaaatcattgtcataattttagtcatactggcagggggaagttcttgattactatttttttcgtatagaatttttcctgtatcccgttcaattaaaatagctgacctagcactatcagcaagctccgaattctttttttctgcggctaaaacaggttgcgtcataagtggaaataaaaatatgacaacgagtaactttacaatagttcgcttcatctccacaaacctccattctttatacaacctattttttccaaggtataatcgatttatactaagggaaataaaaaaagcatcgagaaattctcgatgcttgaagtcatattttcttcttatttttgataagctggaagctgctttactacttcttttacaagcgataaaaactgctgttttactttttcagtcgtttcaattacttcttcatgatttaacggctgatctaaaataccagctgccatattagaaatacaagaaatacctagcactttcatacctgcatggcgtgccacaataacttctggcactgtagacataccgaccgcgtctcccccgataatgcgaagcatacgcacttcagcaggcgtttcatatgttggacctgtatttcctacatatacaccttcttgtaaggcgatatttaaatcagctcctactttcttcgctaattgacgaagatccttgcagtaagcagttgacatatccgggaaccttactccgaaatcagagtcattaggtccaatcaaaggattggttccaaaattattaatatgatcagaaataatcattaagtctcctggattaaaggattcgtttactccgcccgctgcattcgttacaatcaacgtttctacaccgatttctttcattacgcgcactggaaatgttactttatcaagagcgtacccttcataaaagtgaaaacgtccttgcatagctacaaccggtacgtcatgaatagtacctattactaattggcctgcgtgaccttcaactgttgaaaccgggaactcaggaatgtcgttatacggaatttttaccgcgccttcaatttcgtcagctaatacccctagtccagaacctaaaataagcccaattgttggtgtaacagctgattgatttttaatatatgctgctgctttttcaatatattcttttttcatactccattccccctgcttaattcaactcttttaaaaaactttttccatgtttaggcattgctacgccaaaattttctgctaccgttgcgccaatatccgcaaacgtttgacgaatagaaagttcttttccttcttgcatgcctttattgtacacaagaagcggcacgtattcacgcgtatggtctgtcccatgatgaacagggtcatttccatgatccgctgtaataatcaataaatcatcttcttttaataaatcaaatacttcttctaagcgtgcatcatattcttcaagtgcttgcccatatccttgtggatcgcggcgatgaccatagagagcatcaaaatcaactaaatttaagaagcttaagcctgtgaagtccatgtttaatgtatcaactagcttatccatgccgtccatattcgatttggtacgaagagattttgttaccccttctccgtcgtaaatatcagaaattttaccgatagcaataacatcgatgtcattgtcttttaattcattcattacagtacgtccaaaaggctttaatgcatagtcatgacgattggatgtacgtgtaaaattacctggttcacctaaaaacgggcgagcgataacacgtccaatcatgtatggatcatcaagcgttaattcacgagcaatctcacaaattttgtacaattcatcaattggaacaatttcttcatgagcagcaatttgcaaaacagaatctgctgatgtatagacgattaagtcacctgtttccatatgctgttttcctagctcatccaaaatttctgtaccagacgctggtttgttcccaatgatttttcgacctgttttttcttctaattgtgaaatcagctcttctggaaatccatctggaaatacattaaaaggcgtatcaatattaaggcccataatttcccaatgacctgtcattgtatcttttcctgcagaagcttcctgcatttttgtatagtaagccaacggtttttcagctttatcgattcctttaatttcacggatattgcttaggccaagcttagccatattaggcatacgaagaccgttgcagtgctctgcaatatgaccaaacgtatcagcacctttatcattgtatttttcagcatccggtgattcaccgatacccactgaatccatgacaattaaaaatacgcgtttatatgtatgcgccattttattccctccaaatatcaatttatttattctctataaaattcccgtttggaaataatttaaccatcttctcttattggtcagaagtctgacctctctattagtatagacgctttttatttttttgtatacatgaatgaaagtgttttcaatcaaaaaaaccaatgtctatgaactcattggacattggaatcttcctacgctcgcggatgaaactgattgtatacatcttttaaacgtgcttttgtaacatgtgtataaatttgagtggtcgaaatatccgcatgcccgagcatttcttgaacggctctcaagtccgcgccgttctctaacaaatgagtagcaaacgaatgccgtaacgtatgtggagttaattctttttcaatttttgcttcagaagctaacttttttaatattttccaaaacccctgccttgttaaacgccttccgtgatgattaacaaagagtgctttgtcctgttccttttgctttgttaaaacactccggctatgctgtaaatactcttcgatagcctccgttgccaaccttccgatggggacaattctttctttatttccttttccgatacaacgaataaatcccatcgtcaaatgtgcatcatcaatatttaagttaacgagttcagacacacgaattccagtagcataaagcaactcaagcatcgctttgtctcgtatgccaaaaggcgtcgaagtatcaaacacatttaacagcgcctctacttcttctgcatttagcacttttggcagcttgcgctcaagctgcggggtatcaatatgaacggatggatctgtatccgctgctttttctcttagtaagaattgatgaaaagatctagttgaagccacatgtctcgcaatcgttttagatgacttttgctgatcacttaaatatttcagaaaattaacgatgtgaagtcttgttacttcattaaatgatttcagctgctctacatgctctaaatattgagcatacttttttaaatctcgttcatacgaatcaattgtatttttcgctagtccccgctctactactaaataatgaataaaatcttgaatttgatcattcaatagcctctactccccgttttgataaaacataaataaacgctctagccacgtctgatctttgttcacacttgcttgcatgaccttaactgctgaacccgacggctcatcataacgtttataattttgatactcttgagatacccatatcattccaaaataaaacaaaagagtaaacccggtaaataagataaatactttacatgtattatataccatttcagcccatgatttcatgaaacaattcctccaatttttgattctattagaagatatgccaattaggacaggttttatacatgtttcttgcctttatacactgagttctctcctgatgatttcctttctttctataaaaccatgtagcttataaactcgttattttttatttatgtacaacaaaaaaccttctccattagggaaaaggcttttactgcttgtcttctttatcctgacagcgatggcaaatgccatgaaatgtcaagcggtgatctttaattttaaaattccattgcttttccacaatttcttcaacgtcttcaagcaaatcttcttgaatttcgtccacagatccacattccatacacacaaggtgatgatgaaagtgtgcggctccttcttgtcttaaatcgtagcgagaaacgccatcgccaaagtttattttatcaacaattttaagttcagttaacaattctaacgtacgataaacagttgccaatccaatttccggagacttttccttgacgaggagatatacatcttcggcacttaaatgatcctcttcatgttcaagaagtactcttacagtcgcctcacgttgaggtgtcaatttatagctagctgagtgcaactgctgcttaattcgctcaattcgactttccataattattccctccctcgccattcactaatccattatatcagatgtgtcgagggtgtcaaaataaagttattattaataagaaaaaagaattctttttacttaatacttattcttacttatttaatagagccattacacttttcattaaagtaggtgatacgtaagcttcaattgtagctgcacaggcaaccaaacatatcatagcaatcatggttccgctgtagcgtaaaaatgaggcggaaataggctccgctgcttttttaaaaaactgctgccgcacaagcttcaaagaaaaggcaactgaagctgcagacaagatcagaaatgccggtatgagaaagatattttgcggcataacagatacaaaagatagcgcaaaaccagagagtcccatttgattgactaaaaagcctacggtaaaaccaatcaccattccttttaaaaacagcagaattaacactacaggcaaaccaataatggcgattcctaatatccaaatgagccctaagtatttaacattatgaaaaaaactttgctgaaacatttcaacgctgcttgctacttctccactctttacctgtccgaaaaaccggtttaaatagaagtacaggtcttctttttgatcaagcgtcaaactatttacaacaatagccccaaaaatgattcccattaaaaacagcacggtcacaaacaaataaatagaactgttttcttgaaaatgtcttgcatacgataatggcaattgtttttttctcatcgtcttcctcctattaatcgcttaatagagtgtatgatagagtacaaaaactatgccaagaatcttttgaatctatcaaataaaaaaagagaatgagacataataaaatcaacccaatctaaataagatcaaatgagatagtatggatggcttgtgaaacggctgtcgatttccatgcaaggcttcgctttccgcgggccgccggtgaccctcttcgtcgcgtacgcttctgcggggtctcacctattccgcttttcccgcaggagtcttcgccttgccctccaatcaaccgctagaaccaactatataaatgaaatctacattcaccatcaccttaaaaaaatccgaacgaatttgattctccatcaagaatctctattcatcgttcggattttccttcaactaaaatatggttgtcaaacatttttttagttagagatacacgcatgcctgttttttctcacatcaaatgacgtttcaatgtaaacctctaaattgctagattgccgttcgtatgtaaaagaaaaaactctcttactctcctaatccgctttttaactgtaagtactgcacagcataggctgtttttgcatcataaatttccttgttttgaataagagtaagcgtctcatctaccgtaacttccatcacttcaacaaattcatcttcgtctaattccgctttggtggtcatcacttttaaatcttccgctaaataaaggtgcaccaactcatccgcaaaacctggtgatgtataaaaagaaataatatggctaagcgaatctgttgtatagcctgtttcttcttctaactcacgttttgccgtcacaatcggctcttctcctttttctagcttgccggctggaatttcgactaaaatacgatccatcggcctgcgatactgtttgaccataaccattttatggtcgcttgttaacgcaatgacagctacggctccagggtgcttaactacttctcttgtactcgtttttccgtttggaagctctacttcttctaagtacaaatcaatcactctgcctccaaacagcttttcagaagacagcattttttctgttaaatgatccattttctacacctcgttctatttttttgactcttacatatattctatcatacaaaccttgggaggtagaaaaaatgaaagtttatgttcacgagaagcaaataattttggtcggtaaagcatgggaaatccagcaaaagttaaaagaatacggcgaacaatttcagtatgtcgatgaatggacgaacgctatctctcaaaattttaattcttacaaacaagcagactgcagacactaattgtgctgcagttttctaatcttcttatttgagtttccctctatcatagcgctacaatagatagaaacaagtaaaaaataaggagtgacatatagtgacatatatggaaaaaagacacttaggtacttcagacttgcttgtcagtacattaggtttagggtgcatgtctcttggaacggaacaaaaacacgctgtcaatatgattgatgaagctctcgaatatggcattaattatttcgatacagcagatttatatgattttggcttaaacgaggagtttgtgggacaagccctaaaaaaacgcagaaatgatattattttagccacaaaagtggggaatcgctggaatgatgcaaaagacagctggacatgggatccgtctaaagcttatataaaagaagaagtaaaagaaagcctgcgccgtcttcaaacagattacatcgatttatatcaactgcacggaggaaccgttgaagacaatattgaggaaacgattgaagcatttgaagaattaaaacaagaaggcgtcattcgctactatggcatttcatctatccgcccaaatgtgattcgagagtatgtgcaaaattcttctattgttagcgtcatgatgcaatacagcttgttagacagacgccctgaagaaagtgcacttcctcttttacatgacaacggcattagcgttgtagcccgaggtccagtagccaaagggctgctaaccgaaaaaggagagcaaaaacttgctgcattcgagggcaagggctatttagattatagcggtacggaattagcaaaaacgctagaagaatttcgtcacgtacgaccaacttactctctaaactcaactgcacttcaatactgtttagctaatcctgcggtagcctcagttgtagcaggagcaagctcttcttcacagcttcgcgaaaacgtcaaagctgtcgagacctccccgctacagcctactgaagttaacaagctgcaatcgatctttaaaacaaatcaatatgaagctcaccgttaaaaaataaaagcgcctttaccggcgcttttattttttaaactcggaccagttcatatcactttcatttaacagttcttcaaacgatttatttttttctttttcttttcgaattcgagcagcttctttacgctctgtttctttctgctcttcttcttttaaagaaagcgcctgttttttagcttgaagctgttttaataagctatcatttagctgatctttgatactaagctgatcactttgtttttgtgctgattgtttttgcttttttttagccatcacaattcccccgctactttaattgagagatattgtatcatattcttgcttttgttaccaaaaatcaaaatgcatctagttttacatgttcatcaatgattaaagttggctctgtagattgttgaatatcttctaccgtataacctttcgctacttcgacaagttttaggccttctgccgtaatatcaatgaccgctcgatctgtaataatacgatctactacctcttttcctgtcagagggagagtgcactcatttaagattttaggttggtcttttctcgtcacatgttccataatgacaatgatgcgctgcgctccatgaactaaatccattgcaccgcccattcctttaatcattttcccaggaatcatccagttagccaagtcaccagtttttgagacttccatgcctcctaaaatcgcaatattaatatgccctccgcgaatcatgccaaacgattcagcactgtcgaagtaagaagccccttttgtcgccgtgacggtttctttacctgcattaattaaatcaggatctacttctccttctttcggatatggtccaatgcctaacagaccgttttcggactgaagcaccaccgttttattatctgagatatgattagccacaagcgttggaataccaattccaaggtttacataaaatccgtccaaaatttctttttcagcacgttttgcaattcgctctctcacgttcacgccgttttcaatcatgaaaaatctctccccttttgttatttttgaacggttaaacgctcaatacgtttttcttgttcaccaataattaacgattgaacatatacactaggtgtgtggataatatttggatcaagtgagcctgttgaatgaagttcctccacttctgctatcgtcacttttcctgctgctgcaatcattgggctgaaattgcgcgctgtcttgttatacactaagttccccatatgatcggctttccaagctctaaccaaactaaaatcagcttttaacgcctcttctagtaaatattcttttccatcaaacacgcgaacttcttttccttcagcaatgggtgttcccactcccgctggtgtataaaatgcaggtatgcccgctccgccggcgcgaatcttttcagctagcgtgccttgaggtagcaattctacttcaatttctcctgacaatacttgtctttcaaactctttattttctcccacgtaagaaccaatcatctttttaatttgtttgtttttcagaagcagtccaagtccccagtcgtctacgccgcagttatttgaaattacggttaaatcttttacccctgtttcaactaacgctaaaatcaaattctccggaattccacataaaccaaaaccaccgaccataatcgtagcaccgtcgtgaatatctttcaccgcttctttaaacgacgtatgtacttgtttcatacataaccaccccttcgttatttttgaaaacgctttctaatctattataaaagatttttatttctttttaaatatatatataactgaaaattataatttaatcatttttttgtcaaaaaagttatattactagacaaattaaaggaaaaacaaaaacgccacgagttccaaagctgtatgtttggaatctgtggcgttgtgatatagctttaatgtttgttaaaactatatcaaattaaggacgttcaacgattgttgcaacgccttggcctccgccaatacataacgttgctaacccaagttttgcgtcgcgtttttgcatttcatgaataagtgaaactaggacacgtgtaccacttgcaccaataggatgtccaagcgcaattgctccaccgtttacatttaaaatatcatgattaaattgaagttcacgatccacagcgattgactgtgcagcgaatgcttcgttcgcttctactaattgaacatcttctaatgaaacagcagctttttccagcgcctttttcactgcgcttacaggaccgattcccataatgcttgggtctactccggcagttgcattacttttaattgacactaatggtgttaggcctaactcgtctgcttttttacggctcattaccactactgccgctgcaccgtcattgataccagatgcattaccagctgttacagaaccgtcttttttgaaggcaggacgtagtttccctaagctttcagccgttgtgcctgcgcgcgggaactcatcttgttcaaaaatagttacttgaccttttcttccaggcacttctactggcacgatttcatctttaaaacgaccagattgaatagctgcttctgctttttgctgacttgaagctgcaaacgcatcttgttcgtcacgagtaatttcatatttatcacacagattttcagctgtaacgcccatatggtagtcattaaatgcacaccataatccatcttgaatcatgctgtcaactactttttggtcgcccattttaaacccgttgcgtgcattttttaataagtatggtgcttggctcatgttttccattccaccagcaacaatcacatcagcatccccagcaagaatcgcttgtgtagcgagatgtactgcttttagtcctgatccgcatactttattgatggttaatgctgaaacagtttcaggtaaacctgctgctaaagttgcttgtcgtgctggattttgtcctaaacctgcttgtaagacatttcccataataacttcatctacttcgtttgctgatacccctgctttgtttaaagcttctttaattacagtaccacctaaagttgttgcggatacattttgtaagcttcccccaaagctgccgattgctgtacgtacagcgcttacaatgactacttctgtttgacccatgtcgaaaacctctccttactgtttgattactgtgattaactgtcacctgtattaatttcgacatcgcttgcgaaattcctctttttttgtaaaaatttataatttttattgaattttaattttttagaattaaaataaatattagtaagcgtttacaatgtaggaggagagcggtttatgggatttcctgaaaaagtaacaattatagaagttggtccacgagatggccttcaaaatgaaaaaaattttgttccaactgaaaaaaaaattaattttatcaaaaaattaaaagaagctggactatccgaaatcgaaattacatcctttgtttctccaaaatgggttcctcaaatgaaagatgcttctactgttgcagatacatttcagcctgatacatgtcgaaacattgtgcttgtgccgaaccaaaaaggcttggaaaaagcactgcaagctaattgccgctccgttgcgctgtttattggcgtaagcaatacctttaatcaaaaaaatattaacaaaaacaccaaagaagctgtacaaacgctgcttcctctcattcagcagctcaagcagcaagaatgttttattcgaacttgcatttccaccgccttttattgcccgtatgaaggaaaaatacatgaacgcgacgtgctggccctttgcgaaagctttgtgaaggctggagtgaatgagctaagcgttgctgatacaattggcatggcaaaccctaaagatgtattttcacttttctcgaaattaaaacaaaactttccccacacgctacttgctgcgcactttcacgatacgagaggattagccattgcaaatatctatgcagctctgcaagccggtattaacaggttcgattcatccgctggggggttaggtggatgtccattcgctaagggagcaacgggaaacgtagctacggaagatctcgtctttatgcttcatgaaatggatatttccacttctattaatgaagaaaagctgctcgaagcggtcgcttttatcgctcctcacatttcaagaccgattgaaagcaagcaatactctttatttgcacagcgttaaaaattaggtttttatgagagcgatgctataataaataatagctatattaacaaaaggagccgctaatcatgaaaaaatggctattattaataggaagtgttttcggagcatttgccgctcttggcatcttttttacaaatcaaatgatgtacatccgtaaaaagaccgacaaagttattattgaccgcgatacggaagatggcttttatgatgagaaagtctatagcactcttcctaaagaagcatttgtgcttccttcttctctaggctataacatagctgggaccgttattaaacaatacgaaaacaaccgatttatgattctttcgcacggagttacagttcattcactgaactctatgaaatatgctcggctttttctaaagcttggatggaacgtcgttctttatgatcatcgccgccacggcaagtctgaagggaaaacaacgagctacggctattatgaaaaactggaccttcaatccgttgttcactgggtaaaagaacaattcggttcaactatttccctcgggattcacggggaatctatgggagctgcgaccactcttttgtatgctggaatggaagacggagctgatttttatattgtcgactgccctttttctgacttagaagaacttcttgcctatcgcttaaaacaagatttccacttaccaaaacagcttgtgatgccagcagctaatattattttaaaatggcgagaaggctactcatttaaagacgtatcacctatttcagtcgtagatcaaatcaaacatcctgttctgtttatccatagtaaagaagatgactatattcttcctaaaatgacggagcagctgcatgccaaaaaaatgggagcaaaacggatgtatttagcacctgtaggcactcatgcccgctcgtatgctgataatccagaggaatatgaacaagttattgaatcatttttagaaaaaatacaaaaagaagcgctttaaagcgcttcttttgttttatcgataaatgacatgcgcggatttaaaatttgagaaggacattttagcataaacgcataggcactttcattgtagtcaatcgtcatattatcatctaaaaatacttgctttgttttttcgacaagaacaggaacaaaattcgtctcaatgattacatcatcgctctctttttcatcaacaatccatagcgtcgttacaccgctcacaacacagccgcatccatctgtatcgtattttaattttaaatatagtgaagaatctttcccgtacttttcttgtacttttgctatcgctttatcagtaaaggtaatattcattttcctttaactccttttaaactaattgtataaacaaacgaaaattgcttatataatgagtataatacacatctcgctttcattaaactctggcgcttcatatagatgtgtacaaaaaggaggtttttttatgtcaaaagtacaaattaaagtaatggataacggctctttccgtgtcactggagacgttgaattaattgatgcagacggcaacaaatttgaaacaaagccgacattttcactatgccgatgtggccagtcgcaaaagatgcccttttgcgacggaaatcataaaggaaaatttgactcttgtgtgcgcgctgcaaaaattttagacgagcagtagattcatagaaatacagccttactgaacgaaaccattaacgaaaaacattgataacctgtggttaaagcacaggttattttctattaaacgcatcccctgccaatttctctacgagccccggggcaagctgatacatcttcgagcctatattcatccacttaggcaagttgacttctcgttttggcttcccaataatattgaccgttttttcagctacgtattgaggggttaacataaacttttctacacttttttcatagtttcctgattgatctgctattgaaaagaagttggtttgaataggacctggattcactgccgttacatagatatctgttttcgctaattccattcgcaggctgttggtaaaccctagcacggcatgtttagaagctgaatagccactggatttaggtgtcgcaagtttgcctgcttgagaagcaatgttaataatatgtcctttgttttcttttagcatataagctaaaatttcttgtgtacatgcaatcaatccaataacattgacttgaaacattgaggcaattgtcttaatcgatgcttctttcacttcttcaaatacaccaaagcctgcattattaatcaggacatcaacacgcttaatttcactcatcattttctgaacgactctattgacttcctctacgttcgctacgtcagctttgtatatgtaagaggtaatcccatatttttgactaatttgctcggctactcggtgcagcttttcttctgtacgtgcaagtaaaacggggacgccccctcttttggccacttcataagctaaatgctctccaagacctcctgaagcgcctgtaatcacgacatgttggttctttaacgaggatttcaaatataacacaccttttttataagttaagagcacacagaataaataagcgtactttctttttcatgtgtactgattttattggcatcttctaaaaaatcgagctgaccaattgtttcagaaagagttagccctagttctttttcataaatagtaggaaagagctgtttgcaaatatcaaacgctgtttgaggacgttcttttatcatgccaagcactttatccgctcggtcgctttgcttttgtaaccgctcttgtacaagttcgcgaacatgtaacacttcatctccatgacctgtatagatacagtttatctctaaatcaagcagacgtcttaatgaatgattatattgaagaagcgttttaggtcgctcgccgcttggtttcataggaggttcaatgagcggattagatgaaatatgctttaacagtaaatctcctccaatcataaccgctgttctttcattgtataatgcaatatggctttgagcatgacctggtacttcaagtactttccaactctctaggtccggaatgtaatctccttcctgcacagaagttgtaagagaacgatgacatgaatacttcattgatgcttttaaacgttttaaataagggcgaaacctttcatctacgccggctttcataaagtggtcttcaaaaaacgcatcgtaccactcaaaaaaatctggattttgggagatccaaggctgattttttgcatgaccgactatggcgatatctttatgaaaaaaatcaagcattcctacgtgatcaggatggtgatgagttaggacaacttgcttaatatcatctggttttaatcctatttcattaagcttttctttaaatacagaccacgccgcctccgttttaataccagcatcgattaacgtaacggtctgaccttttataacaaaaacattcacatctcctaccgcaaaaggagtaggcagcacaattttatataattgctcattcatctgtatttttgctcctttaccatcgcattttcttttaagtttacacgatttttcctgttatttatacaattgcattcgttttctgaaaattacattgacatccttctctttttcattgcataatgacagaaatatagtgaagttttattcatatctttagataactatgcattttataaagaagagatacacaaacctttaacagatactgaaatctcagtatctgttttcattggatagcaaatgactggaggaacttttaatgaaaacggatttaaacatcgcctttattggagctggatcaatggctgaagctatgatctcagggctgctgtcagataaaaagcttcgccccaatcaaatcaccgtaacaaatcatagcaacgataaaagacttcacgaacttcgaaacgcctatgaaattaacattacgcgtaatcatgccttgttaatcgaaaaaagcgatatcgtcgtgcttgctattaaaccaaaagacgtagcggaaagcattgatacgattaagtcctatattcgtccgcaccacctcgttctctctgttttagcaggtgtatcgactgccacaattgtaaacttgtttgaccaagaagtagcggttgtaagagctatgccaaatacatcggcctctattggattatcggctacagccattgcacccggcaagtttgctacagcagagcatatgaacgttactactgctttatttgaaacgattggtacggttacaactgtagaggaagagcagcttcacgctgtaacaggactatctggaagcggcccagcgtatgtctactatctagtagaagcaatggaaaaagcagctgaaaaacaaggcttggatacgtcagtgtcaaatgaactaattcttcaaactcttatcggtgctgcagaaatgctgaaacagtcacctaaaacgccagccgtacttcgaaaagaagtgatgagtccgggcggcacaacagaagcaggaatcgaacagcttatttctcataacttccaagaagccatgatgcagtgtattgaacaagctacaattcgctccaaatatttaggagatacgattgacgaaaaaatctcgagtaaacgttcgtaaaggttcacctctttctaaaaaaagaaagaggtttttttatgattaaaaatggataagcagattatgtgaaagaaaattcaatgcggtgatataataacttttgtttagagtatcgaaataattggaggttaaaccgaatgacaacaaaactattttcaccttatacagtgaaagatgtaacattaaaaaaccgaattgtgatgtcaccaatgtgtatgtattcatgcgaaaaggaagacggcgtaataactgactttcatatggttcactacacaactcgtgcggttggacaagtaggtctcattatggttgaagcctcagctgtcgtgccacaaggtcgtatttcagctcaagacttgggaatttggaatgatgagcaaagagatggattaacgaaacttgtgacacagctaaaagaaaacggtgcaaaaacggccattcaacttgcacatgcaggacgtaaagcaactgttgaaggcgatatttatgctccttccgctattgcttttgatgataaaagtaaaaaacctgtggaaatgaccacagaacaaattcatgaaacgatttctgcctttaaagaaagcgctcgacgctcaaaagaagctgggtttgatattatcgaacttcacgctgcacacggttatttagtacatcaatttctatcgccgctaagcaataaacgcagcgacgaatatggcggcagcgcagaaaatcgctatcgtttcttaaaggaaattattgaagctgtgaaaacagagtgggacggccctttatttgtccgtgtttctgcttctgactatacagaaggcggattaacagtcgatgatcacgttgcatttgcaaaatggatgaaagaacaaggcgtcgacttaattgatgttagttccggtgctcttgtacacgctccaatcaacgtataccctggctatcaagtgccgtttgcagataaaattaagcagcaggcaaatattgatacaggcgcagttggattaattacaacaggacgacaagcagaagagattttacaaagcgaacgcgctgatttaatttttgttgcgcgcgaacttctgcgtgatccgtacttcccgcgcacggcggcaaaagaactaaatgaaacaatttcagcacccgtgcagtacgaacgcggctggtaaaaaaagacgaggataccctcgtctttttttatgaaatcgtaaaccgtttcaagtcttctgctatgtcggtatttggaaaaatttcttttgctccttctgctagccggctgactgcgtctccttggtaacgcgaactaatatgagataaaataagacgctcagccgatgctgttttagcgatttcagcggcttcttttgcagtagaatgaaaatagttgtaagcaagctcctcgtctcccgctgaaaaagtagcttcatggactaaaacacttgcatgcatagcaagctgaacactttgcatgcactttcttgtatctcctaaaaccgtgatgaccttcccttttttaggctctcctaaaaattcttgaccattgattatacgcccatcttttaatactacttctttcccttcttttaactgctgataatgaggccccgggggaatattcatctcttttaaacgttgaacgtccagtgatcctggcaaatctttttcgacaactcgatatccataagataaaatgccatgttcaagtttgccaaactccactgaaaaagtttcatcttcaaaaatcgttccactttcactttcctcttctatttcaacaatctctagaggatattgcagatgagtttgacttacagccagcgtgacttcaataaattctttaattccttttggcccgtatacagtaagcagcgattctccgccttgaaacgaacggcttccaaggagtccaggcaatccgtaaatatgatcaccgtgaaggtgcgtaataaaaattttctcaattcgcctcggtttaacggttgtatgtaaaatttgatgctgagttgcttctccacaatcaaaaagccacaccgcccctctttcttgcaaaagttcgagcgcaagagatgaaacattccgctgtttcgccggtactcctgcacccgttcctaaaaataacaattccattttctacttcctccttcatacgcacaaaaagcctgtaagtatattatacaggctttttgcaaacttacctatttgatgctgtcaagcgcatacgtaatagtagctaataacagctcaatatcactttcctcaatgttgagaggcggcgagagcgtgagaacattattatagccggccaccgttgctccatttttcccaataatgactcctttgcttttgcatttagcaaccacttcatttacaagattaacgtctaacggttctttcgtttgtttatcagctacaagttcaattccaattaaaagccctttacctcttacgtctccaacgtatgggtggctatcgataagcggcgttagctcacttaatacgtaagctccgagctgtttagaacgatcaaaaagattttctctctccataatttctaaattctttaatgccagtgcacatgcagccgggcttcctccaaatgtattaacatggcgaaaatactcgtactgatcgctatctttgaacgcttcataaatttcttttttaacagcagttgcagagagcggaagatatgcgcttgtaattccttttgccatggtaatgatatctggttttacatcgtaattcataaaaccaaaggcttctcctgtacgtccaaagccgcaaataacttcatctgcaattaaaagtgcaccgtgtttttcacacgtttcttttacgcctttcatataattttgaggcggtaaaagaattcctcctcctgtaataattggctccataataacagcggcaatcgtttcacttagctcccacgtcataacattgtcaatatcttttacagattgaagctgttctttgggtgcatcgtagtcatcttgccctcggtacgaatcaggcggggcaacgtgaataaagccaggggcaagcggttcatatttatatttacgctgagcttggcccgttgctgctagtgcgcccattgaatttccgtgataccctcggtaacgcgaaataaatttgtagcgagaatgctctcctttttgctgatggtactgacgcacaattttaaaagccgtttcatttgcttcagatccgctatttgaaaagaaaataacatagtcatcacctaacatttcatttagcttctctgccagtttgatagcaggtacgtgagattgagtgagtggaaaataagccagttcttttagctgctcataggctgcgagcgctaattcatcccgtccatacccggtatttacacaccaaagccctgccattgcatctaaatagcgatttccttgttcatctgtaatccaagcaccttttgcttttgtagctaccatcgttgcatccggactgtatggtttcattccatgccatacatactgctcatcttttgcacgcagatctttttcattttgactgacctgtaccatcttatccactcccaaatcgctagcgcggtatttttttctgtatgaaaagacttcgacaaaatgccgaagccacttgctatattcatctatatgttaaaagtcaaagcgtgatgtaaccatctttttacgtgtaaagaagttcaaaccgtctttgccgttgacatgcaaatctccgtaaaaagagtctttccaaccggagaatgggaagaaggccattgtagcaggtactcctacgttaataccgagcatacccgcatctgcttcttctctaaattgacgtaccgcttttgcatcttttgtataaatcgttgctccatttccaaaacgagatttttccatatagcgaagtgcttcatctaatgtgtcagcgcgaagcaagcttagtacaggtgcaaaaatctcttctttagcaatggtcatatcaggagttacgcggtcaaaaattgttgctcctaagaaattgccttccatatgttcatccatttctttacgtccgtcacgaatgagttccgccccttctttcatgcccagttcaatataatccagcaccttatcacggtgctcttttcgaatcacaggcgttagaagcacttcatcatcaaagccgcttcccataattaattcatctgctttttgctttaattttgcgacgaattcatcgcctttttcaccaaccacgaccacggcgctgcacgccatgcatcgctggccggcacttccataagccgagctgataatatgtgatactgctttatccatatcgcagtctggcatcacaacatgatgatttttagctccagataaagcctgaactcgtttcccttgagctgcagcttgttcataaacatattttgctaccggctgcgatccgacgaatgaaatcgctttaactttttcatgctctattaatccgttcacaacatcgtgtgccccgtgcacaatatttaataatccatccggtgctcctgcttctgtaaaaagttcagcaagtcgcgttgctaaaagcggcgttcgctcagacggttttaatacaaacgcatttccacatacaattgcaagagggaacatccaaagcggtaccatcatcggaaagttaaaaggtgtgatgccgccaacgacacccagtggaaaacggaacatctcagaatcaatttcttccgctatgttatttaatgattcccccattaataaagtaggagcacccgcggcaaactccacgcattcaataccgcgctgtacttcaccgtaagcttctttaaaagccttgccgttttcttgtaccactaatttagctaactcttcatgatgcttaactagtaaatgctgaaacgcaaacattaatcttgctcgttttggagcaggcacgttacgccatgtttcaaatgttttttgagctgtttccaccgcattggctacgtcttcttttgtagaaagcggtacttttgcaatgacttcgcccgtcgatggattaattacctctccaaatttttcccctgccgtatcaacccattttccgcccacgtaattttttaaaacttgcgtatcattattcacaactgacatatcgcttggcctcctcaaaaaataagaaatgacaaatctacctttattattgaataaataaatggtggttgcattagacaaaatgtgaaacaactctagattctcgtttcacattttgcgcagtgaactcggagaaagcatgaactaaaatgaacatatagtaaaatcagcctcgacataaaaaaacagctgtttccagctgcttacttatccgtttataaattccgcgcgcgactttttcatcataaacaaatattcatatgccataatcataaactcaattgccagtcgtttttccggctccataaagtcttcacccagcagcttttctagtttttcgatacggtgatacagcgtttgccggacaatgtataaacgcttagccgtctcttgtttagatccgttgcatgctaaataaatttttaatgtttccataagttttgcattatacgtttcatcatatgtaataacgggctgcagatattcaaacaccacttcctgtaagtcttcatgttgatgtaaaagcgaaataatccggtacatatgcaaatcatcataaaaatgaataatggtttgtttttgtagcatttcttgaatcgaaatcgtttctttagccgtttcatagcttttatgcatgcagtcaagctgttcacagtattggccaattccgataaagctaatggcgttcctctttgaattttcatccgattcatattgattcatccagcgatgaaggctgttttctaatctctctctccacgtgctaaccattcgtttgttcaaaagaataaataatacttcgcgatttcgctcggagactaataagtgaaagccttcttgttcaaaaatgcttctcaagatcagcttaaaatacgttcgatcaaacttctcccgcctttgccacttacagcaaacaacgacacctccgcgaataggcgaatctgaacacacttcgtgcatagagtcttttatttgttcaagagttaactctccgttcatccattttgtcatccattcggtttcatctactctttttttctcttcgacatacaggtccttcaaaaaatgctgagcaagtgcagtcgccgttcggtcaacggtgagcacttcaagttctgttaacgcttcatttatagaagcaacatatagctgagcataatcttgtcctaataaatgaataggctgctcagtaaaatgcagactttcattttccctgcttatataatgaagtaggagctgctgtttaagcaagtccatctcaggagcaaaggtaatcaattcatttgaaactttaaggccgacaagaagccccgtagattcatataaacactgtaagatgagggccggatcattaactgttaacagcagctgatttagcctatgagaatactgttctaaatcggaaatcatttgatagtgctgattaattaaaagcgagtgaacatcttgcgtaatttcaacgaacggaacttcctcgtgaaataaaataatcggaaaatcacattcgttcgctttatcaattacaatttgcggaatcttagaagtataagtgccaagttcaatacacagtcctgatgccttgcaagaaattaattgctgaagaaatgataaacaagattgagaatcttctccccagcctacccctgttgataaaatgagctcgtttccttttagcagctcattaatgcgcgtcacttccatcacgtgcacccacttaacagaattagtaagccctctctctccagctattacttcacagtttacaaaatgtttccttgttaaaatctctgttactgttaaatatgatttcaagtcaacaccgcccctagcgaatttcacatcatgtctcctggatcattaacgcgtatttcgcatatgtgtagaacaaaagctatatcttcttacattatattaaatatttagaagaaataaaatatttaatgaaagaaacgaaaaaagctgtaacgataatggatcgttacagcttctgagctgtttgctgtaatttattaaaaaaaccttggcgtttaaccgcttgttctttaattcggtgaatttcttttttataaaaacgcaaatcttgtagtgacactgcatttaacatttccatttttaatttatcaataatttttgtttcttcctgtgtcatacactgcatagcttgatccatccgtgtcacaccctttttgtatttaatagatttagtttgaaaacgttctactataatatttactacaatttactagataactaaaccttttctctttcgatgtaaacgaaatgtaacaactgtaatacagtcaatggataatatctagttattttgtttcacatccaaaacgaaaaaaacacaaaaacggatcacttttgtcagccaatatagtaaataacttatagggattagtaaacaaataaagagattgaaacataattaaaattccaatcaacagctagaagcaccttcgtatatgaaacctacgttcaccctgccaataaaaaaatccgaacgattcaccgttcggatcttccttcagctaaattaattttgtcccagcctccgtttttatacttgttgaatcagtacggatgaaaaatattttctagcatccgccgtcaatatatgaagggtttcttgttcggtttggttattttcggtgcgttcaaacgtcacaaatgccccgcttagattctccgttacggctgttattttaaatcctttttgcagcaaaaaatcaatcttttctcgctctgccatatattcatggtaacttgacatttccctgcccccgatctatttcttcatctgtttttataacattaatttttcagcttcgttagccgtgtttaactcattaaactttgctcgttttgtaaattgtccgtagcctttttgaccgacaaactgcttatcttttacgacaaattccccgcggcaaagtactgaaaccggctcacccgtgactttcattccctcaaatgcgctataatcaactgccatatgatgcgtgtttgctgaaatcgtacgttcaacagaagggtcaaatataagcagatccgcgtctgcgccaaccgctattgttccttttttcgggtacagtccgaacagcttagcaatttttgttgatgttatatctacaaactgattgatattaattcgtttcttcactactccttctgaaaataaaatactcatgcgatcctcgataatagggcctccgtttggaattttcgtaaaatctccttttcccagatctttttgaccgttaaaatcaaacgaacactgatctgatccaatcgtttgcaagtcgccattacgcagagcattccacaaaacatcttggttccatttttcacgtaaaggcggcgaccatacgtattttgctccttcaaaattcggtttttctaaataggtttggtcaagcatcaaatactgcggacacgtttcgccccagatatttacgcctttttcccttgcttcagcaatctttttaactgcttcagcgcacgacacgtgaacaacatagagctgtgagtcagccagctccgttagcaccgcggctcttcccgtagcttctccttctatttctggagggcgagtcagtgcatgatagataggatcggtttgtccttgttctagtgcttttgccgttaaatactcaataacatctccattttcagcatgtaccatcacaagcgcccctaattttttagcttgcactagcgtttgataaagggtagcatcgtctgcttgaaaaacatttttataggccatgaatactttaaaagaagtaattccttctttttcaataatcgtaggaagctcatttaatacatcttccgtgatttctccaatcattagatgaaagctataatcgatagccgcttttccttttgatttttcatgccatgtgccgatcgctttttgcagcggttcgcctttattggttaagcaaaaatcaataacagttgtcgtacctccaaaagctgctgctcttgtacctgtttcaaagtcatcttttgtaacggtgcctccaaacggcatatctaaatgagtatgaggatcgatccctcctggaaatatatagttgccttttgcatcaatcacttcacaaccctgctcttcaaatgccgagccaattgccgaaatgactccattttcaattaaaatatcggctttatacgtatctgttgctgtgactaccacaccatttttaacgattttcttcatttcttcatcccctttgtatttatacgtctaatcgctgtgcagccgtcgcttgtaaagcagcttggcgttcattccacgtcattggagactgttcattcggtaattcaaccatggatatagccccatccaccggacatacaatcgaacataaattacagcctacacaatcttcttctcttacttttaaataagattttcctgaagggtctttcagcatatcaatacattggtgagaagtatcttcacaagaaatatgacatttattgcagttaatacacgtatccggatcgatgcgagccactactttataattgagatctaagttgccccagtcggaatattttgaaacggctttccctacaatatcacttactttttcaattcctctttcatccaaataataattgagaccttgaatcatatcctctacaatgcggaacccgtgatgcattgcagctgtacatacttgcacacctgtagcacccatgagcataaattcgacggcttcttgccagttcgaaacgcctcccatacctgatattggaacgttaataaacggacttctcgcacattcagcaaccatgtttaatgcaatcggcttaacagccgggccgcaataacctccgtgagcgccttttcctgctacgtgtggaatcgtattccatgaatgaatgtctactcctgctaaactattaatagtgttaatcatgctcacagcgtcagcaccgcctcgaaccgctgcttctgctgtaacggtgatatctgtgatatttggagttaatttaacaatgaccggcgtttgggcaacttctttagcccaatacgtttgtttttcaaccaaatcagggacttgcccagaggcagcacccatccctcgttctgccattccatgcggacacccaaagttcagctctaatccatccactcctacgtcttctacttttttgacaatttcatgccatttttcttgctgaggctctaccataagagaggcaataattgcgtggttaggaaacttctttttcgtttcatagatttccttcaaattaacttcaagaggacgatcggtgattaactcaatattattaaagccggctacgcgctgaccgttgaagccaacggcagcaaatcgtgaggaaacatttaaaatcggatcaccaagcgttttccaaactgcgcctccccagcctgcttcaaatgcacgctgcacttgataacctgaattggttggcggtgcggatgccagccaaaacggatttggtgattgaatacctgctaaatttgttgttaaatctgccatagatttctcctcctcctgattttaagctgtttccattgtttcttttgttaactgcatatgaatatttaacgccgtttgttttccttgctgagcagcggtcacaaccattgcttctccttgccctttaccaaaaataacgtctccgcaagcaaatacttttggatttgatgtttgaaacgtctcttgattaattaagacaactccgtcttcatgatgcagctgaaattgttgaatcaaagacaggtaccgttcttgaccaattgctttaacaacagcatcgactggaatggtaaacgttgaaccttcaacaggaacaggctttcttcggccgtctgcatctggatctgttagagtcatttttacacattcaatcccgctcaccttaccattttcatctccaataattcgtataggagccgttaaccagcggaattcaacaccatcttgttttgcaaattcaaattcaaaatcataagccgtcatttcttctcgtgtacgacggtataaaatttgaacattttcagcccccaagcgcacggaacatgtagcaccatcaatcgcagtatttcccgcaccaatgacggcaacacgcttacccacaaattctgttgataacgcttctgacttcgtttttttcacaaaatcaatcgcatcatacacaccgtctagctcttcaccttcaacatgtagagaaggcaccttgctcataccaatagctaatacaaccgcgtcatacgactgcagcaattcgctcggaagaatatcttctccaattcttacgtttgttttaatttttacatctaatctttttacttgttcaacttcccaaaatgaaatcgcttgaggaagacgaaacgacacgattccatatgtatttaaccctcctgcttgtttttccgcttcaaaaatggttacatcatatccaaatcgcgccagttctcttgctgcagagagacccgccggacctccaccaacaattgctacctttttaccgtttgctcttcctttctcaaacagcacctgttcattttgaatagcccaatccgttgcgtagcgctgcaaatttccaatcataattggtttggttgagtggttaagtacacacgctccttcacatagttcatcggttggacaaactctcgaacagcttgctcctacgggattagaagacataatcgtttcggcagacccctttaaattgcccgatgcaatttttttaataaacgtcgggatgtcaattcctgtagggcatgcctgaatacagggtgcatcataacagtacaaacatcgattagattcttcgactgcttctctatctgaaaaccctttttctacttcattaaagttttgaatgatggactgcaaactttcctgtgatcgcattgcatcaacctcccaaggatatctgttgataaaactaaaattgaaagcgcttacatattttttatatacgttattttcaacttctactttggtaaaatgtattactaactttattgtacaaaacgaccgtcttttcttcattatacattatgttaaaaaattcagactatttactattcactatgtaaaaagccttgcttttatataaaagcaaggctgcaactattatttggctacttctttaataatcgacactactagttcagatgtcttcaccagttcttctaccggaattttttcatttgttgtatgaatatcttcataaccaactgctaagttgactgttgggatatcaaagccagcgattacatttgcatcgcttccgcctccgctttgaagcaggcgtgaaggacgatcgatattaaccacggcttttttagcaacttcgacaacatgatctccatcgccaaatttaaagcctggatacatcactttaatatcaacttctgcacgtccgcccatttcttgtgcagctgtttcaaacgcttctttcattttcgctacttgcgcttccattttttttggaattaatgaacgagcttctgctaaaatatcgacgcggtcacacacgatattcgtttgcgttccgccttcaaagcgtccaatattcgctgtagtctcttcatcaatacgtccaagcggcattttagaaatggctcttgaagcgatcgtaatagcagaaacgcctcgttcaggagctacacctgcatgagctgtttttccataaattgttgcatttacttttgcttgcgtcggcgcagcaacgataatgtctcccactttgccatcgctatctaaagcatagccgaattttgccgttacgaggctagaatcaagagctttagcgcccactaagccagattcttctcctactgtaataataaattcaattttgccgtgcgcgatgttttcttcttttaatacggtgatggcttctagcattgctgctaagcctgctttatcatccgctccaagaattgtcgtgccgtcacttttaatatagccatcttcaatagatggtttaataccgtttccaggtacgactgtatccatatgagaagtaaagtagattgtgtctacgccttcttttgtagctggcagtgtgcagattaagttgttggctccgtggcccgttttttctttggcatcatcttctactacttcgacgcctaatgcggtaaatttttcttttagtacaacagcaattttttcttcatgctttgtttctgagtctacttgtactaattcaataaataaatcaacgattcgttgttcattaatcataatatgtaatccctccaaaaataacctacaatggtatgttaccatgtttctttgctggacgctcttcctttttattgtgcaacatttcaagcgcttgtattaattttattcgcgtttcccgaggatcaataacatcatccaccattccagcgcttgccgctacgtaaggattagcaaatttctcgcgatactgttcaattttttcgtgtcttgtttcatctgggttttcgctacctcgaatgtcgtttgcaaagataatatttgcagcaccttgaggacccataacagcgatttcggcattcggccacgaatacacaaggtccgctccaatcgatttactatttaaagctacgtatgcacctccgtacgcctttcgcaaaatcaccgtgattttcggaacggtagcttcggagtatgcatataaaattttagcaccatgacgtataattccgccatgttcctgcttgatacctgggaaaaaacctgtaacatcttcaaatgtaataagtgggatattaaatgaatcgcaaaatcgaataaaccttgctgctttatctgaggagttaatatctaaactgcctgccattactttaggctggttacacacaagtccgacaacttttccatctatgcgggcaaaaccaatgacaatatttcttgcaaagtctttttgcacttcaaaaaatgagtgttcgtccaccacttggtgaatgacttgacgcacatcgtaagggcgcacggcatcaaacgggacaacgtctaataaatccggacgataatgatcagactctgcctttgaggctaaaggaggctgctcttggctagactgaggaagatagcttaagagcgttcgtacttgttctagcacctcttgttctgttgcacctctaaaatgggcattaccgctaatttcgttatggacagctgctcctccaagattttcagaggaaatgctttctcccgttaccgtttcaattacttttggtcctgtaatgaacatttgacttgtttcttctaccataaaaacaaagtccgtaatcgccggtgagtacacggctccgcctgcacaaggccccataataacagatatttgaggcatgacacccgaataaatggcatttcgataaaaaatatgaccgtatccatcaagagacatgacgccctcttgaatacgagccccgcctgaatcatttaacccaataaacggcacgcctgttttagcagctaagtccattacgtgcgcaatttttttagcatgcatttcacctaacgcgcctccgaataccgtaaaatcttgcgaaaacaaatagactgagcgaccgtttatcttgccgtaacctgttactaccccgtctcctggtcctacttgattattcatactgaaatccgcacaccgatgttcaataaatggatttaattcaacaaatgtatgttcatccaaaagaatttcaattcgttcgcgtgccgttagtttccctttatggtgctgtttttcaattttttcgtctccaccgcctaactcgatcttccggcgcttatcgtacaattcatttaatttatcataaatgtcaaccatgtttcttctcctcctctagtgttttttcacagagctcataaagaacaccgtttgctgactttggatgcaaaaaagcaatggatgcttcccctgcgccttttctcggaacatcgtcaatcatttgtacacccttttcctttaactcgtgaatccgttcttcaatcgttcgcacacctaaagccacatgatgaagaccttcacctctctttttgatgaacgcgccgacagcactgtcttcaaagagcggctctaataattcaatttttacgttgccgcactgaataaaagcaacttttactccttgttcttctacttcttctacttttaatagagacagtcctaataccttttcataaaaagggaggctgccttcaattgattttacagctattcctatgtgatcaattccttttatcactttctcacctcttttaaaaaagcgttttcatttacacatattcttgaaaacaaaagaaatctcctgctcgcgtgtctacagaaagttgcttgtctaagcagcggaagacatgtaaaataagaaaaaaacgtgtaggaggactttggttgtatgtctaataagaaaatccaaaaaaccgttgtgtttttaatgcttcttgtcatgttaatatctacgcttttagcgggacttgccatgtggttttaatcgagactgatgactaaaaacatagatgcactgctccttctttgtgcaatgcaaacatataaaaaagactggtgactagtcaccagtcttttgctgtatattcacaatgcctttttgagcggctaactcttcaaaagattgatctgtagatacaatccatacttttgtacctaacgggacttgatcatataaatggcttacttcacgattttctacgcgaatacagccattcgatacatatttaccgatggaatccggctgatttgtaccgtgaatgccgtaaatacgtccgtcagtctctcttgcatcaaacccaatccaccttacacctagaggattttgaggagcgcctccttcaatattacttctccgataataaggattaacagcttttactgttaccgtgaactccccttcgggcgtcagattaactgctttccccgttgctactttaataatttgtttaatttctttattttgaatataagcaagctcattgctttgtttattaataataatataaggatcatttggcaacggattttctcctaatggccaaaccggagataatagtaaaaggataaaagcaaacacatgcacgtaatccaccaccttacgttagtcctaagtaaaagataagagaggtatctcttgtcttatttagtgttcgtaagcaagataaacaacatgcatactgtttaacttatttttaaggtttgtttaataaccaaatattgttcaatttctttgactacgtgcagtaaatcggcacgcgcttcaaactcttcccgcgttttgggaagcggcatctctgcaaacgcttctcgtaaatgctgaagtttggctaaaaataattttgctgtattaccggggtggatggatagacttaattcttcaataaaatcggcaatcatgtagcgctgttctaccaccaaatcaatagcggtaatgagaggaagggtacgctcaataatttcaagctgtttttcacgaattttaaaatagcggtaataataattttccccacgcacaaaatgattttctacatcacgaaacgcaaggctttttgctttttctaaaatttttaccgtatctgcaatttccttaccgtcccagctgctgtcattggttctgagatacagggcaatttcttttaacatcgaccggaaattttcttcaatttcttgctgatacgtgcgaagctcttgatctaaacttggcatgtataaattcacaagcagggcaacacctatcccaattacaattaagccaagttcattaaagacgattccccatgtcatattgcctttggagtaaatatgaagcaaaataacggagcttgtaacaatgcctgcattaactttgaatataaccgtaaccgggataaacaaaagcagcatcagtcctataacaagtggatgataagcaatcccttcaaagaatataaacgaaaacagaatggataaagaacaagcaataaaacgatcgcttgcacttcgcaacgattttttctttgaattttgaatgcacaaaatggtgataattccagctgatacaaaaaactcgaggtgaaagaactgagctataataatagccagtgatgtaccgacggctgttttaattgtccggtacccaattttaaatttcattttctagactcctacatgttggtttctttttagtgtgataaaatactctattctttattaacacgaatagaaaaataacacaaccttaaatcttgctgtaccgtataaattccaataaaaaaagtgcagaaaagatcgtactcttcctgcacttttttattataaaatcttttctaagaaatctttagcacgcttgcttttaggagctgagaaaaattcagccggaggcgcatcttcaacaaggacaccgccgtctaaaaacagcacacgatccgctacttctcgtgcaaatcccatttcatgcgttacaatgaccatcgtcattcctgtttctgttagcgacttcattacatctagtacttcttttaccatctctggatctaatgctgaggttggttcgtcaaacagcatcactttcggctccattgccagtgctctggcaatagctacacgctgcttttgaccgcccgataagcgatttggaaactcgttggctttttgagcaagtcccactttttggagtaattctttgcctttagcaacagccgtttctcttgacacgccctttaccgtcatcggagcatacgtcaaattttcaagcactgtcatatgtggaaacaagtgaaaatgctgaaataccattcctacgttttcacgcacacgcataatgtttgtttttttatctgtaatcacttgaccgttaattgaaactactccgctcgtcggttcttcaagcaggttcatacagcgtaaaaaagtagatttaccagaaccagaagggccaataacagctacgacttctttttctttaatcgtagttgaaataccttttaaaacttcatttttaccaaatgatttgtgtaaattttcaacgttaatcaccttttctcattctcctctcgactgctttaccaaggagcgttaagcccattaccattacataataaatcaaccctgcaaaaattaacggttcaaggtaggcgaatttttctccacctacaatgtaagcacggcgcataatgtcgagtgctccaataactgtaacgatagctgattcctttgttaatgtaatgaactcattcattaaagcaggtaaaatatttttaagtgcctgtggcaaaataatttgtcccatcatgcggcgataaggaattcctaacgctaatgccgcttcacgctgtcctttatcaacagctaaaataccagcgcgaataatttcagatatatatgctgcagagtttagcccgaacgcagcaacggccgctggaaacggggcaatatcaaacccgagcagctgaggtaatccaaagtatattaataataattgcaatactagcggtgttccgcgaaacacggacgtatatgcatccgcaaaccattgaagaggtttattgcggctgattttacataaagataaaataactcccagcacaaaccctaaaattgctgaagctaggactatctgtatcgttacccctatcccttttaaaatataaggcatagaaggcacgatttgcgaaaaatccaaattcatgcctagttccattcctctctaactatcattcttatttttggtcgtcaaaccacttaacgattaatttatctaattcaccgttttctttcattttctttaattcacggttaaagtcattcgttagcttgctgtctttaggaaatgcgattgctgatcctttacttgaatctggacgtcctgtatcagacatttgcaagcttttgtctttgttcacataccctttagctactgtatcttcaataatcgctgcatcgatacgatttgatttcatttcttgaattagttctggaatacggtcacgcgttgttacatttactccgtcaacttcttttgcaatttcttttgcttcgtctgcttggatagaagaagtttgtacaccgactgttttcccttttagttcttctgcatttttaattggcgcatctttcttcgatacaatcatgttttttgcttcataatatacgtctgagaagtccacgttctttttacgcttttcagttggcgtcataccagctaaaactaaatcgactttattagattgtaaagctggaattaatccgccaaattccatatccttcacctgtacgtcatagcctaactttttaccgattgtttttgctaaatctacgtcaaatccgattgcttcactatcaccttttgccgtatcaatatattcaaatggtgggtaatctgctgatgttcccattactagtacttttttatctttgtcgtcgctgcttgctccgccattagacgttccttctcctgctccgcatgcagctaaaacgcctgctgttaaaagaccaattgccgttaccgataaccacttcttcaatttcatcttcgttccccctagtttattccttacattattttttaaaaattaataatattatgaaataagttttttgctattgcaagtaaatgccgaaatttaaatatatattcatataaatgtattttaacacaacattataaatatgcaatatcttttttaaatataagtttcactatttgaaaataccttttctcaacattttccactcgttagaaagtctgcatacagataggtaaaaaaacgcataaaaaaagaagccgttcaaaacggcttctctcttacacttcttcacagtgctgttcgaatgcttcttgcagcttcatcacaactgacattggctcgtggccttcaatttcgtgacgctctaccattgtgataatttttccgtcttttaataaggcgaaagatggagatgaaggcggataaccttcaaagtattcgcgtgcacgtgcagttgcttctttatcttgcccagcaaatactgtaaccaagtttgttggacgtttatcataatgtacagcgtgcgctgcagcaggtcttgcaatacctcctgcacaaccgcaaactgaattcaccattacaagcgttgtaccaggctgtttaaacgtttcatctaccgcttcagccgtcgttaattctgtataaccagcagctgtaatttctttacgggcttgacgaacaacgtcgttcataaacaagttaaaatcgatattcattttcatacctcccttttgctatctattctttatcatagcaaacgaaaactaaaaaggcgattgctttgactcattttttgttggtaatcaagattaaacaagaaaaaaaatggtgatactatttttacagctagaaaaccatactcttaactccctagtgtagaaggatccgcataaaatgcaggatccttttttacatttctttcatcgcctgctgatagattttaatcaagtgttcgagagcttcagccattgtggcatctcccgtcatcatttgtttttcaacatcccctagtttttgcttaactaaaggatgttcataaaatgattcttgtaaatattcattaacacttgcttgtaaccatgccttcatttgcttttgccttactgtataaaacagatcatttttattcatccattccttatagtcacaaattttcttccacaagtcttgaaatgatgcttcttcataagcagaagttgtgatgacctgtgggttccatcctccagaatgaccgtgaaggaagccgatgatgctttcgtattcttttgcagtcacttctgcttttagccggttatccccgtctgctttatttacacaaattaaattaacccattcaagcagcccttttttaattccttgcaaatcatctcctgctccggttaaagcaagcaaaacaaagaagtctaccatctcttttacaatcatttcaccttggccaacacccatcgtttcgacaaatatgatgttatacccagccgcttcacaaagaaaaatggcttctctcgttttaagatgaacacctccaagcgttccttgagaaggtgaaggacggacaaaagcattctcttgtttggtaagaagctccattctcgttttatctcctaaaatacttcctccagacaaggtactgcttggatcaactgccaaaactgcaacggaatggccatttttgcataggtacgacccaaatttgtcaatcagcgtactttttcccgctccgggtacgcctgtaaaaccaatgcgcactgaatgccccgtatgaggatagatttctttaatcagctgttgtgctattactttatgcttcggcgctttactttcaattaaagtaatagcttgagctaacgctgttctttttccttcaagcagcccttgtttataatcttgtaccgtttttaatttcaccaattgtcttcaccaactattcttctaaccgtttctttatttcatataaaacagaaacggccgcttttgggattactgttccaggtccaaagattgcagaagcgccgtgttctaaaagaaatgagtagtcttgtttaggaataacacctccgacaataacaacgatatcgtcgcgctctaatttctttaactcatcaacaagctgcggcagtaacgttttatgcccggctgccaaagagcttatgccaatcacatgtacgtcgttttctacagcttgccttgctgtttcttgaggcgtttgaaataaaggaccgatatcaacatcaaatccaaggtcagcaaaggctgttgaaataactttcgatcctctgtcgtgaccgtcttgccccatttttgcgactaaaattcttgggcgtcttccttcttcctctaaaaattcagccgtgagctttcgaacttcttcgatttgatctcgatgcacaaactccgcactgtataccccgctgactgacttagaagtagcctggtgtcttccagccactttctcaatagcttctgaaatttcacctagtgtagctctagctctcgcagcttcaaccgcaaaagcaaggagattcccttcacctgttttggcacaattggtaagtcgattaagcgcttcgattaccgcttgttcgtcacgttcactgcgtattttctttaacttttccagctgcttcattcgaactgctgtgttatcaatatcaagaatatcaagcggttcttcttgctccggctgaaactgattcacacctacaataatttctgcctgcgagtctattcttgcttgtctgcgcgcagcggcttcttctatcttcattttaggtacgcctgcttctattgcttttgtcattccgccgagcttctctatttcctcaaggtgcttccacgcttttatcattaattcattcgttaatgattccacataataagagcctccccaaggatcaataacggaacaaatctccgtttcattttgtaaataaagctgcgtatttcgggcaattctagctgaaaaatcagttggaagagcaatcgcttcatccagtgcgtttgtatgaagcgactgcgtatgtcctgatactgcagccaaagcttcgacgcatgttctaataacattattaaatggatcctgctccgttaagctccagccggacgtttgagaatgcgttctaagagctaaagatttaggattattcggttcaaactgcttcattagttttgcccatagcagcctccctgctctcattttcgctacttccataaaatagttcattccaattgcccagaaaaaggacagcctcggagcaaatgcgtcaattgtaattcccgctttcaagccggttcgtacatattcaagtccatctgcaagcgtataagcaagctctaagtctgctggagcacctgcttcttgcatatgatagcctgatatactgatactgttaaatttcggcatgtactccgctgtatatttaaaaatatccgcaatgattcgcattgacatctcaggaggataaatatacgtattgcgcaccatatattcttttaaaatatcattttgaatcgttccagccagcttttctttttttacgccttgttcttcagctgttacgatgtagaaagctaaaataggaagcaccgccccgttcattgtcatcgacacggacatttgatcaagcggaatcccttcaaacagctgcttcatatctatcattgaatcaattgccacacctgctttccctacatctccaacaactcttggatgatcagagtcgtagccgcggtgggtagcaagatcaaaagcaacagacagccctttctgtccagcagctaggtttcggcggtaaaaggcattgctttcctccgccgttgagtatcctgcatactgcctaatagtccaaggccgattcacatacatcgtggcatacggtcctctcacaaacggtgggacaccaggtgcaaagtgaataaaatcgaggctatctctgtctttttttgtatatactgattttaattcaatttgttcatttgtttgaaaagcagtgaatgaactttgagtcacgtcatcttccctttgctgctttgaaaatgataatggaatattagaaaaagaaggctttttatacatgaacttctacctccaaagcacataataacttcttaacgcattgaataacattcgtcttaggatgtatgacgctcattacacctttttgctgccactgcgttttgcgtgatacatgttcttcccctactacgtacacataaacggaatcttcctcaaaataagtcatcgcttttgttaagagcttttccacgagttcatcacttccacagatcacatatgcttcgtgcttttgttcattcatccaatctgctatctcgacataggaatctatgtttttaattgtttcacacgcaaagcctgcactttcaaataaagatcgggcaatctcagcttttttacggctgttaggatcggtgagctccataatgccaatgctcattccctttgtataaacccgtattttttcaaacttctctgctgctctccacttagtgagcggcacaacactgtcaggctgtgtctgcttcgccatttgttttagcatccaccctgctgttacccctttagatgctagctttgtataatcctctagggaaagatttgatgaaaattccgaagcgttctgatcactgtatttatccatttttatttcttcttttctaaacggcgtgctttgtatctcttgagatacatcctgttgcttaggagcatagtgtgtgactccgatcaagcgctcaattcggcactctatattctcttgtctttttactttcatttgttcaacttcatcttgaattcgcccttgttttaaagcttcttccattccgccgtggtcttcaatattgccaaataactcccaagcttttgtcattaattcatgtgtgtaggcttcaacgtaccaagagcctccggcaggatccgttacttttgatatatgtgtttcgtgctgcaaaattaagtgagtgttacgggcaaggcgatgagcgaactgagaagatgaagacgtgacagaatcatatggctcaatatgcagactatccgctcctcctacaatagaagcaaatgcttgaaccgtgttccttaatgcatttgtatacatgtcttctttagactgtgtaagatgtgacgtttctgtatggataaacggcactgaaacggccgtgtcatcaaaagcacgaaccacatttgcccaaagcatgcgaaaagcacgaagttttgatatttccataaataaatgtgagctaactgaaaaagaaaaggtcatatgaggtaaaacttgatgtaaggacaaaccgcgttttatgcattcatcaatatactgcacacctgtagcaagcatgtaagctagttcttgaacagcgtttgcaccgctgttatggtaaggaatgcttgatacaatgatcgttttgagctctggaacattactgtgagccaaacgcgttgcgtaagctaaatgatcgtataaatctcgagtagaaagtggaactcttccatattcagcaagggtgccgagcggatccattccaaccgttccttttagctgtctcatattaaagttatgatcaacacagtatgcttttagaaacgaaagaagcggaacggatgtacatcccgtatttaaaaataaaggcaccgcttcaagagctacatgctgaaacaaatgagcaacatcctctaaagtagaaattgtagtgcctgagactacttcagcttcagttgcttcatcaacgtctttcccttgcctcattgcttcactgcatgtaaaagcggccgtattttgtccatttctcaaactgtgtaaaagaagtttattgctttctttaatagaaggtaagtcgattttttgggtgatttcccattcccctagtatgtatgattctttaccggctcctcttaaacaatctattcccgccggactctgctgtaagtagtctaaatgtgccgtatcactttcgaaataaagcggtttcaaaaagatgttttccaacgtttcttttgaagagatcgcggtatttttgctaacttcctgtgcccaatcttctttaggtgtacgtgtaaattcatgaaatgataatgtatttgttttcatttccatgcccctttacagttaatagctgcctgctaaaccgagatgattacactttgaagtttgatgattcttcttttattttaatacatcttttacaaattgttcaatcattgcttcaaaataaaaagaggccgagacataattaacctacgtttaccatcaccataaaaaaatccgaacgagttggattctctttcaagaatctcaattcatcgttcggatcttccttcagctaaaatatttttgtgccagcctctgttttaatagacggacgtattctctttagaagtagattctaaaatctctttaactcttgccaagaatctgccgcacaccaagccgtctaacacgcggtgatcaagtgataaacataagttaaccatatctcgaacagcaatcatgttatcaataataaccggacgttttacaatagattctacttgtaaaatagccgcttgcgggtaattaataatccccattgattgaacggaaccaaatgatcctgtgttgttaacagtaaacgttccgccctgcatgtcttcagacttcaatgaacccgtacgaactttttgcgcgagctctgtaatttcacgcgcaatacctttgattgtcttttcatcggcttgtttaataaccggcacaaataaagcatcgtctgttgcaacagcaatggatacattaatgtcctttttctgaacaatacggtctcctgcccacattgaattcatttgagggaattcttttaaagcttgagccactgcttttacgaagaacgcaaaatacgttaagttaaaaccttctttttgtttgaactccgtctttaatgcatcacgataagaaactaagttcgttacatcaacttcaaccattgtccatgcatgcggaatttcgtgcttgctgcgaagcatatttgctgcaatagctttacgcacgcctgtaacagggatttcttgatctcctgctgcagacacaaccggcgcgggctgctgcgtttttggagcagcagctgctacaggtgcttctggctgaactgttgatggaggtgtttctttcacttcagcagctccgcctttttcaataacagctaaaatatcttttctcgtaatgcggccgcccgcccctgttcctgtcacggtatctaaattaatattatgctcttgtgatagacgcataacagctggagagtatcgacttttattggattgactgtccgctgtttttgacgctgattcttctacagtcttatcagatgttttctgttctttttgaggtacagttccttctacttcaattaaacaaatcacttctcctacaggcaaagtatcatcttcacctgcaattaactctttaattgttccactaaaagaagaaggcacttcagcatttactttatccgtcatgacttcagctaacgggtcgtacttatttacgtgatctccaacagaaacgagccatttgctaattgtaccttctgttacactttcaccgagctgcggcatcgtaattttttcaatagccaattgatacaactccttttaaaattgagctaattctctcattgctttttctactttatcgggattcaccataaaatatttttccattgttggtgcatacggcatagctggaacatcagggccagcaaggcgctgaattggcgcatctaaatcgaataagcagtgttcagcaataatagctgctacttcgctcatgatgctgccttctttgttgtcttccgttaaaagcagtactttacctgttttagatgctgcttcaataatagcttctttatcaagcggatagaccgttcttaaatctaagatgtgtgctgaaataccgtctgcttccagtttttcagcagcttgaagagcaaagtgtacacaaagaccatatgtaataaccgtgatgtcgtctccttctctctttacatctgctttgccaatcggaagtatataatcatcttcagggacttctcctttaatcaaacggtacgcacgcttatgctcaaagaaaagaactggatcatcatcacgaatagctgcttttaataatccctttacgtcataaggcgtagaaggcatcacaatctttaaccctggcgtattggcaaatagggcttcaacagattgagaatgataaagagcaccgtgaactccgccgccgtaaggagctcgaattgtaattggacaactccaatcattattagaacgatagcgaattttcgctgcttctgacacaatttgattgactgcaggcataataaaatcagcaaattgcatttcagcaatcggacgcatgccgtacattgccgctccgattcctacgcctgcaatagcagactctgcaagaggtgtgtcaatgactctttcttccccgaactgttcgtatagtccgttggtcgctttaaatacgccgccttttttccctacgtcttctcctaatacaaacacgcgggaatctctttccatttcttcacgaatggccattgttactgcatcaatatatgaaataacgggcatatgttctcctccttactcaccgtacacgtattttaaagccgattccgcttctgcataaggagcgttttcagcataatctgttgcatcattaacgatgttcataatatcatcaagcatttgtttttctcgttcatcggttaacacgttaacctcttttaaataagtcgcaaaatacgccagcggatcgctctttttagcttcagacaattcttctgctccgcgatatgcacgatcatcgtcatcacttgaatgggcagtcaaacgctctgaaacagtttcaataagagtaggcccttctcctctggatgcacgatctcttgcttcttttaccactcggtatacttcaaggacatcgtttccatcaattgtgtagcctggcataccatacccaattgcacgatcagatacttttgcgcatcctagctgcttttcaaccggaacagaaatcgcatacttgttattttcacacataaagataacaggaagcttatgaacacctgcaaagttcgcgccttcgtggaaatctccttggttagaagatccttctccaaacgtcacaaacgttactaagtcttttttctccaatcgtcctgctaaagcgattcctacagcatgaggcacctgtgttgtaactggagaagatcctgttacaattcgcttttccttatggccaaagtgacctggcatttgacgacctcctgagtttggatcttctgctttagcaaacccagaaagcattaaatcgcgcgcagtcattccaaatgctagcacaacacccaaatcgcggtaataaggtaatatgtaatcattctctctatttaaggcaaaagctgcgccaacttgagcggcttcctgaccttgacatgaaataacaaaaggcaccttccctgcacgatttaatagccacatacgctcatcaatttttcgtgcaagcagcatagtgcggtacatttcaagtacttgttcatcagttaatcctaatgattcatgacggttttttgtcatgtttaaacctcctttaatcatcaaaaatgaatcgcttttccatctacagctaatgaagcttctcccatcgcttctgaaaggctagggtgaggatgaatggtatgagcaatttcccatggtgtagcatccaatacctttgcaagacctgcttcagagatcatatccgtcacgtgaggtccaatcatatgcacaccaaggacatcatttgtgtcggcatcagcaataattttaacaaatccctctgcctctccatatacaagagcttttccaacggccttaaacggaaactttccaaccttcagctgaaacccttgctgttttgcttcttgttctgttaatcctacacttgctgcctccgggctgctgtatacgcatttagagattgttgtgtaatcaatcttcaaaggcttttcaccatgtaaatgctccacagctacaattccttcgtgagaagctacatgtgcaagctgcagtccgccaatcacatctccaattgcgtagatatgagattctttcgtttgataaaaatcatttgtggcaatcacaccgttttctactacaatatcggtattctcgagaccaattccttcgacattcgcttgacgccctacagatacaagcagcttttctgcttcatattcttgcatatcgtctcctacttgagctgaaattttcacctgaccatcaatagacagtgtatcagccattactttagcagaagtaataatgttaactccttttgcttttaaaagcttcgtcatttcacgggagatatcttgatcttctgttggtaaaattcgatcgctgtattccacaaccgttacatcaacatcaaaatctgtgagcattgacgcccattcaattccaatgacgccgcctcccacaataataatagaagcaggaagtgtttccatctttaatgcttcatctgaagtgattactttctctccgtcaatcgttagaccaggtaatgttctaggacgagacccggttgcgacaattacattctttggaataagcatttcgttttcttcaccgctttttaattcgacggagatagttcctggcataggagaaaaaatagaaggtcctaaaatacgtccaattccttcatatacgtcaattttaccttttttcattagctgtttaacaccattatgtaactgtgaaacaatttctgactttcgttcttgtacacgggcatagttcaatagtacattggacgtttctacgccaaattcactgcttttcttagccgtttggtagacttctgcacttcttagtaaagctttgcttgggatacaccctgcgtgcaggcatgtgccgcctaacttatttttttctacaaccgctaccgatagacctaactgagaggcacgaatagctgctacgtaccctccggttccaccgccgagaatgaccaaatcatattcttttgccacactgcttcacacctttctgcaaacgctattaagcgcctttatattccttcacttcttcttcacctgtaagcactcggagagccccttcagctaacgcttgaagctcattttctccaggataaacaatgacatctgcaatccactttacatgattaataatcagctcaacaaacgcttttgaataagcaatgcctcctgttaaaataatggcatctacttttccatgcaataccgtactggcagctccaatttccttcgaaatttgataagccattgcttcatagataagcttagctttttcgtttccatttttcactagcgcttcgactttctgcacgtcagatgtgcccaaataaccgacaagcccgccttttcctacaagcattttcataatctcctcgcggtaatactgacctgaaaagcaaagacgaactaattcaccaaccggtacaccaccagcgcgctctggactaaaaggaccgtcaccgtgcaggccattgttcacatcaattacttttccgcgttgatgaactccgactgtaatgcctccacccatatgggtaacaataacgttcatttgttcatatgtgctattcatttctttagccacttttcgagcaaccgatttttgattcagcgcgtgaaagatgcttttcctttccataaaaggagttcctgagatacgagcgatgtcacttagctcatctaccaccactggatcaacaatgtacgctggtatatttaatccagacgcaatctcaaaagctaaaatcccgcctaaatttgaagcatgatggccggcataaccgtcttttaaatctttgagcatggcttgatttacttcatatgtgccgccttcaatcgggcgtaaaagccctcctcttccacatactgcacttaatttagataaattaatcccttcttcatcaagtgcctctaaaatcgagtttttacggaactcatactgtgcatatatcgtctcaaactgattcatttgctgtgaatcgtagcggattgttcgatcaaaaattggtttatcgttgtgaaacacgccaatttttgtagacgttgaacccggatttattatcagcattcgatattcgtgcatatccaacacatgtcctcctaccttatcattctcataaacgaaggctaggtcgaaaggatttcatttattccttttgcctagccttcagctcaaacattagcgcgtatgacgtctacttaaaatatgctgtccattttgtaaaaattgactgcgtgaacgacgcagcttttcaattctttcttcagctaagcgatctgctgctagataggttggaatgccatctcgctttgagatttcaactaccttttcaatattatcataaataccttcaacttttttcagcgcacgctcacggttatatccaactagctcatcggctacgttaataacgcctcctgcgttaataacatagtccggtgcatatacaatgcctaattcatgaattaaatcaccatgacgcgtttctttcaattgattattagctgccccggcaataacttttgcttttatttgagggatcgtttcatcgttaatcgttgctccgagtgcacaaggagcatagatatcacattctacaccataaatatcattcgggtctactgcttgcgcatcaaattcttctaccgcacgctgaacagcttctttattaatatccgttacaataagtttcgctccttcttcgtgaaggtggcggcataaattatatgctacgtttcctacgccttggacagctactacttttccttcaagcatatctgttccaaatgcttcttttgctgctgctttaattcctcggtatacgccgtaggctgtgactggtgatggattgcctgatgaaccaaaagcaggagatacacccgttacataatccgtttcctcatatacaatatccatatcctctaccgttgtgcccacatcttctgctgtaatatatcgaccatttaacccttgaataaagcgaccaaatgcacggaacatcgcttcatttttgtctttgcgaggatctccgataataaccgttttccctcctcctaaattcaagcctgctgctgcatttttataagtcattccgcgtgatagacgaagcgcgtcttcaattgcagcctcttctgattcatatgtccacattctcgtaccgcctagagctggtccaattgttgtatcgtgaatggcaataatggcttttaagcctgaatctttatcttggcaaaataataactgctcgtaatcgtatgtttccatatagtcaaaaattttcattgttagtgcctcctaagaattctgttgagcgacgctgatagcaagcgccagtgagtataatttactttctgatgaatctgctctggatgttaagacgaccggagcttttgctcctgctagaatagctccaacttttgctttagcaaaataaatgagggatttatataagacgttccctgtttcaattgctggaacgagtaatatatctgcttgaccggcaacttcactttgaatgcctttttgcttggctgcttctatgttaatggcattgtcaagtgctaaaggtccatcaataacgcagcctttaatttgtcctctgcggttcatctgtgtaagaagtgcagcctctactgttgcaggcatcaaagggttcacaacttcaaccgctgcaataggagctacctttggcatctcgatcccaatcgagtgggcaacgttcaccgcattttgaatgatttgaactttctcttccagagacggcgtaatattcatagctgcatctgttacaagaatcggacgatcatagtgaggaacgtcaaatacagctacatgtgataaaacatttcccgtacgcaaaccatgctctttatttaacacagcttttaaaataagcgatgtggataaattccctttcattacgatatgagcttgaccttgctgaactgaacgcacagccaattgagccgcttctaaaacggactccgtatgtacgaccatcacagccttatgagtgagtaaggatgggcggtactgcctgaataattcattaattgtcgtttcgttgccaaacaaaataaattcagaaacttcccttgacacagcttcatacactgcctcaattgtttctaagtcttcagctgcagcaatggcaacagtcaaagaagactgcttagcaacccgagataagatggtagcaagagtcatggaatgttcgacctctcctttttcattctttcttttgctccgttttaaagagcatactgcgcgtttatgcagtcacctaaaatacatgcaagatttgtgccatccactgcatatattacataatatagctgcttatatccgttcttacgcacaaaaaaaattttttattgattctaacgacaaatagaaaaaaagaatacctctctatttgtatgcaataaattgcacaccatgcattttattgcatgctgttatttgcaagattgtatttttccaacttataatacaaagaacgcagggaaatattgagctgttttgctgttttcgttcggttatactcgtttgcaagcagcactttttgaataagttccgcttcgtaattttccatcatgtgcgctaaagtcttcccatcgaacattacctcttcattcacctgatttttttcttttttgcccttgccttcaagtgaagggagatgaacagaatcaatcattgtttctgtatagtgcatataaataatcgctctacctaatatattttcaagctctctaacgtttcctggccagtcgtatgatcttaatgaatgtaaagcccgctctgttactccttcaacatgccggccgtaatcttgattaatttttgtaattaagtgtgtaacaagcgcaccaatatcctcttttctcttccgaagaggaggtatgtgaatcggaattttgtttagccgataatacaagtcctgtctgatgcttccatcagccattcctttttctaaattcacattcgtagctgcaataacgcgaacattcaccggaataggagtcgttcctccaacgcgaataagctctttttcttgaagcacccgaagcagcttagcctgcatatgagctgagagctccccgatttcatctaaaaagatgctaccgttattggcttcttcaaaaacgccgcgcttcccgcctctttttgccccggaaaaagctccttcttcgtacccaaaaagttcgctttcaagcaaggactcagaaagcgcagcacagttaatccggacaaatttattaaactttcggctgctcgcattatgaatcgcatgtgcgaacagctctttacccgtcccagattcacctctaagcaaaacagtagctggtgttttggcagcaagtctagcctgctcaattgctaactgaaactcttcagattgaccaatgatatcagcaaatgaatatttcgcttcaagcgttctgataatttgacgcgctcttttgagttcatttgtaagctcttgaatttcagacatatcatgaataacaccaacgctgccttttaattttccatcaacaataacgggggcaacattgacaaccacgtctcttttactcggaccgagcctcattcttacacctcggacaggacgccttgtttgcagtaccttcatgtgcatactgtctccttcagagatatcggcagtcgcgggctgaccaataatatccgtcttttttaaacccgtaattcttgtataagcaggattaattaaaattcctcttccttcttcatcgacaaccgaaatagcttcttcagaagattgaataatagcttgaagcatagtttgtacttcttttaagtttgtaacttcttctgccaatccgacaacgtccgtaatatctttaaaaatcgaaaaggccccaaacagctctccattctcgtcgagtattggtattctagtcgtaattaccttccgtccgctatctaacacaaattcactattttgatcaatcgtttttgtatgaagaacatcaacaagtttactatttggaatgacttcatgaagatgcttaccaattacatctctgtgtgaaaagttcgtcaaacgctcggcactttgattaaatagcgtaatatatccattcctatcaatcacgaccatcgcatcatgagctgcgttaaaaataagatcatatttatacgattcttgctttaacctctgaattaactcttctttttcctccatcagatttgccataatttcagcaaccaatcccggcactaccagtgcatcagcgggtttgcttctttgcaattgttgaaagacgccttgtttacctgttgtttcaacaatgacatcgagctgctttgtcatataaggctcccaattcattccggttgaaatatcttgttcttgcgcatgcaaaacagccggcgcgttagctcgtacgtctactacaccaatcactttcataaattctgtttccaacaagattttcagaatagctaatccgccttttcctcctccaacgatcaacacattttgcatattttttcaccttttctacttaatatgtacatatcccgtgcaaaatattgcatatacctatcatataaaaaaagaaacgctcttgacaatttatttagttcttttatgattcaagtataacggtttcacaatgtaaacgcattcattttaaaaaaagagaagcgaaaggagcatttatggttcgaattatcgcactgctaatcttacttattcccggtatactcgctggctatggcattaaacttatgagagatatgatttttggcatcctgcaatccccgttcccttctttatttttgcaattttcagtcggtcttctattatttttaatcggccttggatttgttgctggctttattctgcacagagaccgcaagcgaaacaaagttcaaaacagatttcaaaaagataaaaaaacatcgcattaatgcgatgtttttttacgaaaagcgtcctccaaattgcttcaccattttttctggataatcggtaataacggattcacatccatattttcgaagctgctcagctacttttacatcatttactgtgtaaggtcgcactggaatttgacaatcttttgaagccgctacatttacttcattaacggtacgctgattagggtgaagagcttttgcgccaagatgctgcgcatatacccaaggctcatacatcggataagaatataaaatagctgtttcaatcgtagaatccagagaaccaattcgggctaagctgttatgattaaaagatgaaatcatcgttcgatccttcatcttgtataaataaattaaatccaagactttcatttccaagtatggatagtcaaatatattgtttttcaactcaatatttacgctaattccttcacttgaagcccactccattacttcatttaacgtggggattttacatactccatacttttttttgaacttatagctcgcatctaatttttttaaatcttgatacgtaaaatcttttacatacccttttccattcgtcgttcgatctactttttcatcatgaattacagcaagttctccatcctttgtcatatgcacatcaagttcaattccgtgtgctccaactctcgctgcttctttgaaggaaatcatcgtattttcaggaaacgttccagctgcgccgcgatgacctattacaaacatacttgctcaactcctctattatcacttattattaactttagcattacttaatagtgaaagcacgaatttactgtttatacttttttactttcattactttatatgcaaaaggaggttgttgtgtatgagaccactgcaaatttcaccggatacagccgtaaaattagcggaacaattaaatatccccctcgagcaattaatgcatatgcctcagcatattttgctgcagaaacttgctgaattaaatgcgagcgaagataaaaaaggatctgaataacagatccttttttcttttgaattttcatttccaaaaatagtattaccttctcatttcattccccataacatatattagaatatttaataatataaatgtatttttaaaaatgcttttaaataagtaatttaatacttttttgtgtatatttaattattttttgatttttccatataatttcattgacgaaattattgtttttctactaaaataaaaagacattatatttattccagtacttatattctgattttttgattaattcaaacaaaagaattaaatagtatgagaaaaatttagggggacttcattatgcaagcagctgtacaacacgaaaatcagcagccaaatgggtctaggaaaaaacaccctcctggactgtacttattattcgctactgaggcatgggaaagatttagttattatggaatgagagccattctggttctttatttaactgctaccgctgctcaaggtggactaggggtagataaagcaactgcactgagcttatatggaacattcactagtgctgtttacattacgccgatgattggcggatatttaacagaccgcttcctcggaagaaggctagccatcactatcggtggtgtgattatggcactcgggaatttttccatcttcattcatcaaagtgtagccgctttgtatatcggacttgctttattaattatcggaaacggatttttcaaaccaaatatctccacattggtcggagatctctatgaagaaaatgatcctcgccgtgacggtgcttttaccattttttatatgggtattaactttggtgcatttttcgcaccgttagttgttggattaatgagttacaaatacggatttttaacagcagctatcggaatggttgttggacaaattttatttaacctactggctaatcgctacttaggtgatatcgggaaagagcctacaggaaaagttcacgcagcggcatctcaaacatcaactgctccgctgtcagcacgagaaaagaaaagaacggttgctatcgttattctagccttcgttgttattgctttctggacagcttttgaacaggccggaagttctttaacgctatatgctcaagatcaaattaatcgtcaaataggtagtttcacggttccaacagagtggttccaatcattgaatccgctgtttatcatgattttagcaccaattatgtcactagtttggtacaagctcggaaattcaaaacgcggtgatttcaaaacgccaacaaaaatgggtatgggacttgtgacagtgggattaggattcttaattttaattccagccgttatgtatactggtaatgacccagctttaaaagtaaatattctgttcatgattttcacttacttcctgcacacgctagctgagcttatgatttcgccagtagggctgtctatggtaagtagactggctccattaaagcttgcttctcttttaatgggcgtatggatggcaagctctgctgtcgctaataagctagcgggtgttcttgcatcttatacccagtctttaggttatttcgatatcttcagcttaatcggagctgtaacaattgtacttggaattattgttctgttcctttcaaaaccgattgctaaattaatggattaaaaaaagcagccttttctgaaggctgcttttttataatttacttatctatatcccatttaaaatatggagatgaatttttcaatgcatcttctaaatcttctttcaaacacaaaatcctcataacaattaaataaattatttcaataaaatactccactatggatatgaagaaaaacaagatgcacgttccattaacctcaatattttcacctcttaaaccaaaataaaaagaccaatgaatgagtaaaattcatcggccctgcagtaaaaagtttattggttttcagtttactatctagtgtaaatcccaaaaatttatcggcatgtactctgtattacaaaaggtatcagctcactcaaaaccccgtaattccagcagtcctatccctttcaactcgctttatgttcaaggcgtaatttatccgcaaccatggcgataaattcactgtttgttggcttcgcttttgacatgctgacagtatatccgaataatgaagaaatggaatcaatatttcctcggctccatgctacttcaatggcatgacgaatggcgcgctcaacgcggcttgccgttgtattatatttttttgcaatatcaggatacagtacttttgtaatcgacccaagcagctcaatatccttatataccattgaaatggcttctctcaaatacaaatagcctttgatatgagcaggtacaccaatttcgtgaatgatgctcgtaatgcttgcatctaaatttgctggtttgctgtcgcgatgtgaacgcatggaagaagatgaacgttgcataaatgaagatgtttgtccgctaacttgacgaatatgattcactaagttttccatatcaaacggctttagaataaaataagcagctcctaaatcaaccgcttttttcgttacgtcttcttgcccaaatgctgttagcataatgacatttggataattttcttttttcatttcttttaactgacctaaaactgctaatccatctagatgcggcataataatgtctaatacaagaacatccggatctttatcttttaaaatggataaacactcttgtccattgtaagctactccgattacttccatgtcttcttgctctgaaatataatcttcaagcaaaccaattagttcccgattatcatcaaccaagcatactttaatttttttcaatgcagcttcctcctcagtcctttatgttatacgtcgtttcctacgtgtctctattctttattctaaaggacaaattcgacaatgcaacattatttcctttatttttttagaaaaaagtcttttaaatggaatttattcgattttctcttattttctttgtttttcgacgtttttctcttacatttacgacaataatttttatcaaaaaaagcgaactaatgacaacattagctcgctttttttcgattatttttataaatatcgattcctgcttcgttaagcatccattcaatatggacaccgtaacccgaggtaggatcatttacaaaaacatgggtaaccgctccaacgactttaccgttttgaataatcgggctcccgctcattccttgaacaattccacctgttttctttagcaatttaggatctgtaattttaataaccattcctttagtagccggaaacttttgaggtatagtactcataatttcaatatcaaattcttccacttgatcatcatctactaccgttagaattttagccggtccttcttttacttgatgagatagggcaattggcattgctttatccattattccgttttccatcgttgaagacaattttccaaaaataccaaaaggactatttcgtgtaatatttccaatgatttgtctatcttcagaaaaccttgctagcttttcgccgggaacgccgttagaacctttttcaattgatgtaacggtcgaacggacaatttgtccatcttctactacgattggcttttttgtatccatatccgaaataacatgacctaaagcgccgtattttttagattttggatcataaaaagtcattgtgccaattcctgcagctgaatcacggatatataaaccgattctgtaagcataatcttgcttatcttttaacggatatagcttagtgtcaaactgctttttttctcttaaaatatgcagatttaatggttcacccgtttttcctgcctgctgaataaacggtgtaatatcactcattttttcaatggttttaccattaatcttcgtaatcatatctccaacttgaatacccgcaatttcgccaggagatcttttaccttttgctgtatctacttgatgatagcctacaacaagaacaccttttgaatttaatttcacaccgattgattgtccacctggaatgactttaaaatcagataatacctgcacgtctacacgctttacaggaataccggccaaatgaagcatcaactcttctttgcctacttgtttgcctgctacggtcagcttcgccttgttacttgttacatcgtaaacaggtgatgaagcttctacgctaagcggtaatgtcgtattaattttttctttttgctgttcaaataagacgatttgttttggaatgtgtatatattgttgcacaactggaataaatcctacaaaaatgaacgaaacaaggagaatcgcaccaattatatgtctgtatcgattttgcatgttttcactctcctcgcttcctcgcctaaatggctacacatttaatttagccttcttagagcgcatttataacagaagttcagagaaaaatgaaaagaagtgcaaggaaacattttcagttcctccattttgtataaaaaaacacctttaacacatactgttacgtgttaaaaggtgtttttttaaatggtgtgcttcatcttatccgctaaatctaaaagctctttggcatgttccttcgttaagcttgtaatttcagctcctgcaatcattcgaccaatttcttttactttttcatcaacagttaacggaagaacagacgtcgttgtacgatcaccttttatctctttagcaataaagagatgagtatctgccatcgcagctacctgaggcagatgagatatacagagaacttgtgaatcaacagaaatagcatgtattttttcaccgatcgattgagctactcttccacttacgcctgtatcaacttcatcaaagataatggacgtcacgccttgatgcttagagaagatgctttttaacgccagcataattcttgacagttctcctcctgatgctacttttgcaagaggctttaaaggttcaccaggattagtagaaatataaaattctacgttgtcaatgccgtctttggtgaattttattctttctccatttacttcaacgtcatttttacctgcatttacaacagagaatttaatttgaaatacggtcttagccatatacagttcttgaagctcatgatggatactgtccgttaactcctgagcaagtttttttcgaatagctgaaacgttattagcttctactaataaatcctgtgctacactgtttaactcttctttgatcttgctcacatgcgtatctcgattttcaatacgatcaatttcatcttcaatttgcgctgcatattctagaatttcatctacactttgaccgtatttacgctttaagtgattaatttcatttaaacgcgcttcaataaagtctaagcgtttgggatcaaattctaataaatcaagctgctgacgaattttataagatgcgtcttctagctgatagaagctcgatgaaatgatctcagaaatttcggcatagtttttttccagtgacgaaatatcctccgtatggttcattgctacaccgacccaatctaaaccttggtgttcaccgtgcagggcattgtacgcatcgtttagcgacgtatagatcttttcaaagttagaaatcttcaaacgctcttcatttagttcctcgtcttcgttcagctgcaaatttgccgctttgatttcatctaattgaaattgaataagatcgaggcgatgtgccatctgctgttcattttcagttaattgatcaagctgcttttttagcgatgtatacctagaaaatacctctcgatactccgtcaaagcctcttctactttttctcctccatattgatcaagaagagttaagtgacgatcttgattcattaaatcttggtgctcgtgctgtccatgtatatcaattaacgtctgtccaacttcacgtaggatagctaacgttacgagcttaccgttgatgcggcaaatacttttcccatttgtagtgatatctcggcgaagcacaatcattccatcttccacttccaaaccgacttgtttggctttttcgtgactcggatgctgttcttcatcaaataagaaaagtccttcaatttcggctctgtctgttccgtggcgtacaaactccgaagagcctcttccacctactaacaatgaaatggcatcaataataatcgatttccccgctcctgtttcgcctgttaataccgttaagcctttttcaaatgaaacagaaagttcatcaataatcgcaaagtttttaatggataattcagctaacaacctgcttcactcacctttataacatttctaagaatcggtctgatataatttgcgtatcttcaggagtacggcaaataatcaaacatgtatcgtctccacaaattgttcctaatatttcatcccaatccaaatgatcaattaatgcgccaatcgcatttgcatttcccggtaatgttttcatcaccaacatatgccccgctgaatcaatttttacaaatgcgtccataagagagcgctttaacttttgtaagggattaaaacgctgatctgcaggcaagctgtatttgtatcgaccgtccatcaaaggcactttgactaagtgcagttctttaatatcacgagagattgttgcctgtgttacattaaaaccttggttttttaaaatatctaccaattcatcctgtgtttcaatatcattattcgtgataatatcacgaattttaatatgtctttgccctttattcatgttggcacctcacattaatatgtaatcttctttttgttttgttgtttataagtctttcactaattaagtatcataatgtgttcaacttgattatgcaccttttgtataaagagtcataatcaaatcgccaatgctaagtctttgcttaacattggccattattactttttctcttttaacgtcttatgtgcttcttcgactacttcgctcacagtaagcggagcttgattttcaccaagttcacgctcgcctttccagcgcaagtggagaagaaattcgatatttccatctcctcccgttatcggtgaatacgacatgttatatacatcgtatccttgacgaagggagaaatccaccatgccttgaagaacttcttcatgcacttttgaatcacgcacgattccttttttcccaacttgctctcttccagcctcaaactgtggcttaacgagcgcaacaacatcgctgtgtggaacaagaagtgtttttaacacaggaagaatgagtcttaaggaaataaatgatacatcaatagaagcgaattcaggcaagcctcttgataaatcagctggcgtcacataacggaaattggttcgttccattacttctactcgttcatcttgacgaagcttccaagctagctgattatagcctacgtctagcgcataggacatcttcgctccattttgaagcgcacaatcggtaaagcctccagtagaagaaccaatatcaatcatgattttatccgctacatggacattaaattctttaatcgctttttcaagcttaaagccgcctctgctgacgtaaggcatcactgcacctttaattgtcagcggcgtatcgcattcaattttctctcccggcttatccaaacggacttcattcgcataaacgagtcctgccatcactgtacgctttgctttttctcttgtttcaatcaaacctcgttctactaataatacatctactcgttctttttttgtcacttgacttcaagcctcttttgtgttggtgttacgagttttttaactcgatttataatctcttctttggttaagccaatttcttctaaaagttttgttacgctgccgtgctcgataaagcgatctggaatccccatacgttcaacgcgcgtatcataatagccgtgctctgatgcaaactctaacaccgcgcttccaaaaccgccttgaagtaccgcttcttctaccgtaatcacaggcttactagtttggaaaatctcatgaagcattttttcatccaacggtttaataaaacgagcatttaccactttgacgctgattccttgcttctcaagttctgctgctgcatccatcgccattgaaatcgttgtaccaaacgttaaaatggttgtatctgaaccttcttttaatacgtcccatgtaccgatcggaatgtttttcaattccgaatctagttcaacacctaatccgtttcctctagcatagcgcatagcaatcggaccttcttcataagtcaaagcagtgtgaaccatgtgctggccttcattctcgtcttttggcatcataataacaaggttaggcaaatgacgtaagaatgcaatatcaaacacgccttgatgcgtttcaccatcagcacctactagcccagcgcgatcaatcccaataaatacatttagcttctgacggcaaatatcatgaaccacttgatcgtatgcacgctgtaaaaacgtagaataaatagctaaaaagggcttcatattttgagttgcaagacccgctgccattgttgttgcatgctgctctgcaatcccaacatcaaacatgcgatgcggaaactctttttgaaatgcttcgagttttgaacccacaggcattgctggcgttacagctacaatgcgatcatcttccctagccatcttcaataccgtatcacttactagtttactccaagcaatcggaacatttttgtctttaataaagtcaccggattcaattttgtaagggcctgtaccatgccatgctccgcttttatcgctttccgccggcaagtagcctttcccttttttcgtaataacgtgaatcagcaccggaccttttgttttctttgcatattgtaacgtttccaataaatcatcatagctatggccatcaactgggcctaaatacgtaaagccaaggtcttcaaagaacatgcctgacacgaccatatactttagaccatcttttacacgttctgccgttgccgcaagcttaccgcctactgcaggcacttttttcagcaagacttcaagctcatcttttacccagttgtatttgcctgccgtgcgcaaccgtcctagaatactgtgtacagcccccacgttaggagcgatagacatttcattgtcatttaaaataacggtcatatccgtttgctcgtgcccgatgtggttaagcgcttcaagagccataccacctgttaaagctccgtcaccaatgatgggaacaatatgagcttttgttttttgcaaatctcttgcagcagccattcccattgcggctgaaagagatgtagaactatgtcccgtttcccatacatcatgttcactttcgtcacgctttggaaaaccgcataatcctttatattgacggattgtatcaaactctcccgctcgtcctgttaaaattttatggacatacgactgatgccccacgtcccataaaaatttatcttttgggctgtcgaacactttatggagtgcaagcgttaactcaacaacccccaaattcggccctatatgaccaccagttgcagaaagctttgtaattaaaaaacgacgaatctcttcacttagttcttctaattgtgttactgacattttctttaaaaactcaggattttttatcgttgtaagatccaaggtggatcactcactttcgtacttgttataaagttaccttaatacattgtctattgttttatacgtatagtcaatttttagtatttccttattacttacaatacctttgatattctatcagtaaaccagtgatattcaaaggaaaacagtgaaaaaatagccgctaacacaaatgtgataacggccaccaagatattgtatatgtctttcaaacctatgcactacgcttttatacagtagtaaaatcattatagcatagcccctattgggactcaatcttattttactgtatcactcaaaaaacctgacagagatcgtcattaactatcacgttttgctatatataaacaaatttcttctagtaatccgtgcttaatttgagcttgacgtaacgagagaagtgcttgttcaacatgatactgtaacttttctttggccgcttccatacctaacaaagaaggatatgtcgttttttcattttctgtatcactgccaattggctttcctaatttttcttcagagccttccacatccaagatatcatcttgaatttgaaacgctaaccctacatgcttactgaattcttctaataattcttgctgtagaagcgtagcttttgcaagaatagctcctgcttttacacaaaaacctagcagcttccccgttttgtgaaggtgaatatattcaagctcatctagcgtgagctgctttttttcgccttccatatccgcaacctgtccgctgatcataccttctgttccgcttgcttttaccagttctgtaatgagctgaagcttcatatgtgatgtaatctcgggatgtgccgcttcagaaatgagctgaaaactatttgttaaaagagcatctccagctaatatagccgttgcttcgccgtacaccttgtgattcgttggtttacctcttcttaagtcgtcatcatccatgctaggtaaatcatcgtgaatgagagaatatgtatgaatcatttccactgcacatgctgtttctaatcccatgctctcgtcttttccaaacgcatgtagcgttgcaaacaacagcactgggcgaagtcgctttcctcctgccgtaagcgagtaaagcatggattcctttaagttaaccggagcatgtaatgcttttaccacttcaggcaagcgtgtttctactcgatcttttgtaaaagaaatatactcttttaaattcatttcattcaccatcactcttcctcctgcaccgagaatggctcaagcgttccgtcttcacgtaaaatagtttccatttgcttttcaatatgctgaagacgatcgtgacagaattttgaaagagtcattccttcttggaattgttgaattgcttcttctaatggcacgtcgccttcttctagcttgtttacgatggtttctaactgctccatcgcctcttcaaacgtatactctttatttgtcgccatttttcatcgctcctctattttcgaaacttcacactgcaactgtccatcggtcaaacgaacgtttaccacatcgcctttggatacttgtttggttgatttaattaactctttttctttatcgtatactaagctgtagcctctttccattgtttttaatggactaagcgtatgtaattttgacgttgccgttgcaaataaaagctgtttttgctttagcagctgctgcatctcttttgtcagcattttcgtcagctgctgttgacgctccgccgctttcgttaactgatgctcggggtgattgcgcaacaaagcggctgttagctgctcgtagttcgtccgtttatgttcaatgtaccttctaccttcacgataaaaacgctccatcaactgatctaactgctgctctttttgctcgaccaacttttgaggataacgaaaagcatatgatttctgggatcgttcaagcctgcggctactagactgaagcatttctttcattgaacgaagaagacggatgtttcgctgagtcaatctttctgtaatttcactgatatgaggcacagctaattccgcagcacctgttggagtaggagcgcgaagatctgctacaaaatctgcaattgtaaaatcggtttcatgtccaaccgctgaaataacaggaatagtagaagtgaaaattgcacgagcaacgctttcttcgttaaaagcccaaagctcttcaattgacccaccaccgcggccaacaattaatacgtctgcttctttacgacggtttgcttcttcaattgccttaatgatagacggtgccgcattcactccttgaacaagagcgggcataacaataatgttcgcattatatctgcgctttaatgtcgtaataatatcacgtacggctgctccagttggagatgtaataacacctattgttgttggatacttgggcagttttcgtttcctagcaggatcaaataagccttctttttccagcttttttttcagctgttcgtaggctaagtataaatttccaacgccgtcaggctgcatttcttttacgtacatttgataatttccgcttggttcataaaccgaaatttcagctcgaatgagtacattcattccttcttcaggctgaaaattaagcagccggttatgcccagcaaacataacggctgcgatacgagcattttgatctttcaaggtgaaatacatatgtccccgactatgacgtttaaagttggaaatttctcctttaatccatacatcttgcatgtgagggtctacatcaaacttgcgcttaatgtatcgtgtaagagccgtaacggttagataacgcacttcactcatcgttttgcctcctttgcagtcaccctctcccctttatataaaggagagaagcattttggtcacttgatttggcaagatgaacctttatttagataaagttgttaacactttagacaatacgccattgataaacttgcttgattgatcatcgccgaacgttttcgctaattcaatcgcttcatttaacgtaacgctcgtaggaatttcttcttcatacttcatttcgtatacggcaatacgtaggataacgcggtctacagtagctacacgatctaacgtccatttttctaaatgattgcgtaaaagttcatcaatttcttgctgatgttcaaccacacctagcacgagactttctaaaaattgatcagacttttcattttgtacaacatttccgattgcctccattggctcggtctgccctaaatcatgctgaaatagtgcttgtaatgctttttggcgtgctgtatgtcttttcattatttttgctcctttatttatcttcttcaactagtatacctagataatagcatagtttatgatacgatacttcattgttcttagacgaagtttgtagaacacgaaaaagaccgtctttatgacgagacagtctttttcactttaccatagcttgtgctgaaaaggaacaagtaatcatacgttattccattttagcaacagccgttaggtaaacgtttgttttattcaacttcttcaatatcagttttttgcgtatcaaactgaatccctacgatatgaatgtttacttcatcgagatcaatagctgtcatatttttaagggcttgacgaatgttatcttgtacttgttgcgctacgtttggaatagacactccaaacttcatcatacaaaatacgtctacttttatcccgttttctgttaagtccacttttacacctttaccgtggtttttctttcctagtttctccacaacgccagctgcaaaatttcctctcattgcagaaacgccttctacttcagaagcagcaatacccgcaatgacttcaataacctcaggagcaatttctactttgccaagagaatttgggtgttcttccatttctaatacatgattttcattcatgtacagcacctcctatagtttatattatactaagaattcattacgtcatatagctcaagaaacttcgtgttgaattcaccgctaacaaatttttcatgatttaatagtttttggtgaaaaggaatagtggttgcaacgccgtcgataacaaattcatctaacgcccgcttcattcgttcaatagcttcctcacgagttggcgcatgaacaatcaatttagccaccattgaatcatagtaaggcgggattgcatagcccgggtatgcagcagagtctacgcgcactccgtagccacctggcggcaagtacatttgaatcgtacctggtgatggcataaagtttttctctgggttttccgcgttgattcggcactcaattgcccatccgttaaatgtcacttcttcttgcgtaaacggtaaagtttcaccatttgccactttgatttgttctttaattaagtcaactcctgtcaccatctctgtaacagggtgttctacttggatacgcgtattcatttccatgaagtaaaatttgttttcacggtaatcataaatgaattccactgttccggctcctgtgtaattaacggcttgagcagctttaacagcagcgtcgcccattaattcacgcgttttttcgtctaacgctggagaaggcgtttcttcaattaacttttgaagacggcgttgaatcgagcaatcacgctctcctaaatgtacagtattcccatgagaatcagccaacacttggatctcaacgtgacggaaatcctcaatgaacttttcaatgtacacaccagggttaccgaaagctgtagcagcttcttgctgtgtaattgtaatacctttaataagctcttgttcatttttcgcaacgcggattccttttcctccgcctcctgccgttgctttaataataacaggatagccaatatcattagcgattgacataccgtcttccactgactctacaattccagttgaaccaggaacaattggaacacccgcttcacgcatcgtttctctcgctacgtcttttgttcccattttgttaatggcttcaggacttggtcctacaaatgtaacgttacactctctgcatagctctgcaaaatcagcgttttcagctaaaaagccgtatccagggtgaatagcgtcacagcccgttagcatcgcaacactcataatgtttgtaaagtttaaatagctgtctttagatgacgttggtccaatacaatacgcttcgtctgctaattgtacatgcaaagaatcgcgatcagcttgagaatgaacagctactgattctacacctaactctttacacgctcgaataattcgaaccgcaatttctcctcgattcgcaattaatagctttttaatcatatttaccgctccttattcaggctttactaagaaaagaggttgaccgtattctacaagttgtccactttcaactaatacgtcaacgatttcacctttaacttctgcttcgatttcattaaataatttcattgcttctacgatacatacaaccgaatctttttgtactttatctccaggagtcacgtatacatctgattctggcgatgatgacgcatagaaagtccctaccatcggagatgtaattttatgtaagctttcatcaaccgctggggccgcttgttcttcttttggttgagcagactgtgctgctggggctggcgctggagccgctgctgcctgcggtgcaggtgctgccacttgttcaggtgccgaaaccactacttgctgcgcttgtttggaaacaattgcgtcttttttcttcatcttgattttggagccttcgtgctcataggtgaactcctcgattgatgattgatcaactagtttaatgatctcacggatctcttgaatttttaacatattgaacactcctacctcatgaaaatagaattctctacaatgttaataatacgacagatggctacagccattcaattcgtttggcaaacattaaaaagaagttccacttactctataataactttttagcgttatcgttttataaatggaaacatagctttacagatgacaacacttatgaaaacgtttgtcacctagtactaatataagattatgaaacctattataaccgaagtaaaaaaagaaagccatgttaaaatttttaccgtctcgcttaaattttagtcatttcataaaaaaagaagtgtaaacaaccccaatttacggctgtttcacacttcttttattccctttatttagttggttgaaactctaccgctacttcttttggacccatttcttttttgactagctgaatgatttgatttgcttttgtttttgagtgtttttctgtcttaaccgtaatttgtacttgctttccgtctgctcttactagcgcgtcactgtatccttttgctttaattaatgtttccagcgtggcttctttttccccaagctttgataattcatcaattttatccatcgccttgcttacttccgcaggcgtcacattttttgatgcagctacttcttgatactcttcttttaattgacttctttcatcatttaattccaaacgaagagccgtaaatagctcgtcgctatctgtgcttgatacaaccgctgattcttttgcatttttagccgtttccttctttacatttcctgctgaaccttcagtttttgaatcttcttttgttcctgatttctcatctgtctgttgttttgtatcttctgcaggagccttgtcatcagcctgcttttcgctctgtttttcattgtctactagcgcaacattactctgaggattttctggcgttgtcatataatacaccgataacacaacaactaaacttaacattgttaataaccaaaccgtttgcttttttaataacatattcatttccccctcatccttttttcgctaatactgctactctatgacttggtatatcgagcgctcttgtcacggcttcaataatagatttctttacctcgatattatcagctcctttagcgacaactaacacgcctcttacttttggcttttcggttttaactacaacaggcttttcttgttctccacttcttacaatgaccagctgttcgtctgttgaggaatcttcaactttacgagtccctccttcacggtctgtttcgttggtcgtttgcgattttgtgacgctgtttttttcatatattttggattctgttgcatctaggttcacaattacttttaccttacttacgcctctaacttgatccaaaatatctttcaattcttcctcataccgctcttcatagcctgtcattgttgttgtctttttagagctaaaagcgggaacatcctgtgataccggtggtgcgctggtttctttgcttgcactctttagtaatccgcctgaattcatagatgttgtgagtgagttgctaaataccataaagataacgcctgcagctagtaaaatgcctatatacattaactttgaaggtttcttcgtagttgatgactgtttaagtgaaaagaaccgctgaaaaaatgatgggtcacctttttctggcttttgactcatttcgtgtctccctcctccatattcacaacaacttggccttgttttacatcccattttgctgctaaatagttggataatttcttggattctgttggtttgtttgtttcgatcggtgtggaggtatcaatagaaataactttcacagctgaaacaacctcggaatcatccgatgcttttttacttacggcaactgaaatggatttaatattatcagcggtaggttcgtcgttcggcttttttgtttcaatgtgaattcgatcaattgctacaccatactgatccatcaactcctcttttacatctgcctccatttggacagccatttgttctaaaatatatgcacgttgtgaagcttgtatttcttttttctgattttctattgaattttctacctgctgatcggatcgaatagatgataagctaagtgatttcagcatttgattaacatccactttgaaaatttgaaaaacgggtgtaataataatcaacattaaaagaagtccaaccaccagctttgtatatttttgaaaactagaattgggcaatagtaaattaataatggtagctaataagataaaaagaacgatattagtaatccacgtcgttaaggcctgcaatttcttcacctcaccatcattgtgacgttgctcgctgtaatgatgaccgttaaacataagaaaaacataagcgagacaaccgcaagcgccgcaaaaatatagatgacgcttttactgataatgctcaagcaggaaataaccggtcctcctccaatgggttgaagaagagctgctgctagcttatagataaaagcaagcgttaacactttaatagccggaaacgcgacgattaacagtaagactgctactccagcaatccctactgaattctttaatagaagcgaggcactgatgactgtatcagccgcatctgtgaacacacgccctacaacaggtataaagttccctgtgacaaactttgccgttcgaattgtaataccgtcggcaacagctgaggtagccccttgaacggacagcactcctaaaaaaacagttaggaatattccgagcacgccaatgcttatatttctcaacagctgcgcaagctgtgtaaccttatattcatctgaaatcgtactcacaatgctaagcagtgctgaaagaaaaagcagcggcatcactacgtattgaataagcaaaccgcttgtgttcattaaaaacaaaatcatcggatgaaaaaaggctgccgatacaactcctcctgatgatgccattaaggcaagcagcagcggcaccagagctaaaatgaatttggtcatggtctcaatcgctcccgttgcataagagatagcaatttgaaaactattaagagcaatgatgatcaaaaccatatatacaagcgcatacgctactttacttacggtttgctgattaaacgcactttggagcgtttgtaaaaacacgctaaaaaccgttagcataatgagtgtaccgaggagttttccattcgctaatacttcatgaaataaaaactttacaagacctcctagccattctttaagagagaactctttttctccttttaaaaaatcgactaaacttcccttctgactctcgggtaaaaagccgccgtattgggtaataatatcgtcccaaaactgtttgacttcatcgataccgagcttatcaatttgttcattgacaagttcttgctgcttcgggggttcggaagcttgtacattttctggaaagaaaaaaaagaggaacaaaagaagagcgagtatattcactttaaacgtccaccgcttcatttcgtcacctcatattaagtaaaattaattgggcagcattgaaataatcgtttcaataatgaccgttaaaataggaattgccatggagagaatcagcacttttccacctaattcaattttagaagcaatggcaccttgccctgcatctttcgtaatttgagcaccaaattcggcgatataggcgataccaataattttcaaaatggtttccacataaatcatgttaacgtgggcattaatcgacagccgctcgaccatcttaataatttcgtagatttgatcaattaaaaacagaaagatcacggatcccacgaatacaacaagtaaaaaagcaataggtgatttatgttcttttaaaataagagccaaaaacgtagctactaaccctaagcccacaatttgaagcatttcaatggcaactcacccctctacccttgaaataaaaaaaccgatttgattttttgaaataagtcctctacaatcgaagcaaccataaataaaatataaataaaaccgatgagggtaacccagttcgcgtaatctttttttcccatctgttcgagtacggtgactaaaaaagctacgacgataccaatcccagcaatctgaaaaatggtgttcatatcaattcccacattcaatcctcctctatcgctacatcaatagaatgaccagtagcaatccagatagaaagcctaaacttttaaccattttttcatagcgattctgcttatcaactgcatcttgttcttcgcgttcaagatgattcagcgtcagtaagatatgcttttgctgcgaataacgatcatgctgaccaagcgtttcaccaaattgttttaagatttctagttctcccgttttaagtgcggtttgtttccaaaattggtccaacgtcttttcccaagcttccttgacactttcagtaccttcttttaatttcatagaaaactcattaaataaagaagccaaaggattaggaagctgtagagataacaaatgagcaacttcttgaagaggccgattgctgtacataatttctgcttctaacgacctcagagccgtttttaattgcctgagctgcctaggtcttgcactaagctgctttgcaaactcaaatcctgtgtaagtggaagcaaataagataaagatggcaccaaacagtttcatacaccatcaccctttactattttcaataagcgacttttcagcggacgttttcatggaattatagtgctcatcgtagatagcctcaagtgttccaggacctcggctgttcgatagcacaacataccttttgaatacgtgaagtttcattaaagcttgcaaagtgggacgcttcattaaatcgtcaatgtcatagccatgaacagtcataatgacacgaacgccagcattaaccgcttcaagtacggccttacaatcttcttcacttcccacttcatccacgatcagcacatcggggctcatggagcgaatcatcatcatcatgccttcagctttcggacagctgtctaataaatccattctagatccgaatgtatgctgaggaacccctttaacagccccagcaatttctgatcgttcatctacaattccgactttaaacggaggaatcttagagcgctctatgcctgtacttattactctggctaaatcgcgaatcatggttgtttttcctgtttgaggaggtcctataatgaccgtactttgccaatagcgattgtataaaaaaggaataagctgattcgaaataccaatcttttgtttagcaatccggatattaaaggatgatacatctcgaatcacacgaacctgtccattttccgttacaacttttcccgctagcccaacccggtgcccgccttcaatggtgacatatccttttttcaattcttcttcaatcatataaatcgaaaactggcttaatttatttaagataaataaagcatcttctgcacttggaagatacgattcgaaatatggctgattgttgattgtaaattcgacaggtcttcctatgcgcactcgaatttcttctagtagatgagaatggtttgtgacataaaattcaacagtcttttttaaattaggcggaaagattgcaagtatttcgtttaacatattcatcccctcatatttgaactcacttcaatgtattataagcttgaccattttatgcctaccttttatttaaaaacaccgattaaaatgaagagcactcctactacaatcatgattaatttcccaaaagataattgatcggctacggacactaaacctatggtaaaagaactcaccattacaatcggaccaacaagcgctaacattccattaatcattaacgcttttttcacatcattgtttgtgacaattaaaatagcggcaataaactcaataaatgaagaaataaatcgaaggcacgccatcgttaataccgtaccgtttaaatgatccaaccactgcttcataagcccctcctatacctctgctttgtttagtacaacctatgcaaaataaggaagagttagcacaaaaaaacatacaaaaaaggcagagaatgattctctgccttttttgtatgtttgcagcttgcttacacgatccaattacgcgcgtgatacgtagctgctgtctgttgtgttgataattaatacgtcgccttcgtttacgaagaacggaacgtttactgttaagccagtttccacagttgccggttttgtaccgccagaagctgtgtcacctttaataccaggttcagtttctgttactttaagctcaactgtgtttggaagttcaacacctaatgtctcaccttggtacatcataattgctacttccatattttcttttaagaattttagctcatattcaattgcacttgcaggaagctctaattgctcataagactggttgtccatgaatacgtgctgatcgccgcttgcatatagatattgcattttacggttatcaatttgggctttccctactttttcacctgcacggaacgttttttcttgcacagctcctgtacgaaggttacgtagttttgagcgaacgaatgcagcgcctttaccaggctttacgtgttggaaatccattacacgccaaatacctccgtctacttctactgtcaaacctgtacgaaaatcatttactgaaatcatgaagaaatcctcctatattttataaaataatgaactcttttgatgagtgcgataatgcctcattaccttctgctgtgacgatcgtatcatcttcaatacgcacgccccctaagtctggtatgtaaatacctggttcaacggttacaatcatacctggctgcagtacatctgtagatttcacagaaagtgatgggccttcatgtacttctaaccctacgccgtgaccggtcgaatgtccaaaatactggccgtatccgtgttctgtaatataatcacgcgttagcgcatctgcttctttacccgtcatacctgctttgatgccgctcattccgttaagctgcgcttgcagtacgacattataaatttcttttagcttatcacttacttcaccgacggcaaatgttcgtgtgatatctgaacagtaaccattatagtatgcgccaaaatcaagcgttacaagttcgcctttttcaatgactttgtcagaagcaacaccatggggtaaagccccgcgatgccctgaagcaacaattgtatcaaaagatgaagatgttgcgccttgttttctcataaagaactccagttcattagatacttgaagctctgttaaaccaggacgaacaaaggttaaaatatgttcatatgctgcatctgctatttttgcagcttcctttaatatcttaatctctgagtcactctttatcaagcgtaagttttcgattgcctgcgagattggaacaagttccgcgccgatatgcttatcaaataattgatgctgtccatatgtaacataattctgttcaaaaccaagctttttaattccaaattgtttcactacattcgctacttcttctacaataggacccttgtgctgaacgatatcaaaaccttctgtttgactagttgcttggtcaacataacgaaaatctgttacaaatgccgctttgtcttcagaaataataacgacaccagcagatcctgtgaaattggtcatatagcgcctgttatattcacttgtaattacaacaccgtccacattcaattttgaaaactgttcgcgtagtttttcgattttcattttatttcccccttaattgtaaaagtgcctgcagggcaagctcatatccatataaacctaacccgacaatttgaccatgtgtaacaggtgccgtcaccgaatggtggcgaaactcttcacgcttatgtacgttcgaaatatgcacttcaataacaggaacagatatactagcaatcgcatctcgaatggcataactgtagtgagtaaaagcaccaggattgatcataatcccatcaaatttctcatccgcttcatgaatccagtcgataattacaccttcgtgattagactgtacgcactcaacttctatcccatggtctctgcctgctcgctgaagtttctcttcaaggttttgaagattatctgtcccatataccgctggttcacgtacgcctaaacgatttaaattaggaccgtttattactaaaatcttattcatcttaattcaacactctcccctactacgaaccctttatgcagctcactcatgtgaatttgcactttatttttctttttaaatcattatatagaatatattagcatacgttggaacattcacactacttattcgccgtttgaaaatctgtagattcatcttttgtttgaagctctgcagcttcaaaagaaatggaatatccgatgaatacaccatataaaatataaatacagagggatgaaataatcgtgttagctggaagctctccaattgtttttaagttaggaaagagcggattcaaaacaacgaatacaattgcccaccataataagccgtaagcaaaacctatccaaatcgttttaaacttctttaataggacgtagtataacaacccgacaacaatagataatacccctataagaaaaatactgacgataacacctattcctttgtccttccaatcacctaatgcccaaggatctaaaagcatatttggattgataacactaaagctgaacagataatttaaatagccaataaagctccagaaaatccctccaaaaaaggaaataaagatggctttaaataaaaaagacatttcctgtttatgcgtagggtggttatcctgttttttttcatgctgttctttaggttctgacatattaatcacctcttgatgtagtatgaacttttttctcatttcctactgactcatttctaagtttttacgtttattactcttcctatacgcaagaagggagcctgatatcaaagagacattttaaaactacttcgcacagagtttcataaacaaattttataagtgaaaggaaaaaaattcataacaagggtgtggagatgaaaaatattggctaaactagataacatgcatccgcctagaggtttatttgattttgctgtagaatataaaatactaagaagtctagtctagttaagttaggttggtgcctgaaatgtctaaattacaaaaacctgcgtatggtggtcaagccgttatagaaggcgtcatgttcggcggcaaacgtatgatggtgacggctattcgccgcaaagatcaatctattgattattttcattcaaaaagaaaatcaaattccgtactcactgcttttaaaaaaattccttttttacgaggaattgctgctattgttgaagccagtgcaaacggtacgcagcacttgaacttttcctctgaacgctatgacgtgaatccagaagatgatgctcaagtagcagaagaacaacaaaaagagaaaaaagaatcaaaactatctttaatatttggcgttgcaactattggtgtaatatcctttcttttcgggaaagtactatttacattgattcctgtgtttttagcacaattgacacgtcctgttttcacttcaagtgtagctcaggtttttattgaaggagtatttaaactattattgctccttggctatatttatgtgatttcacaaacgccacttattaaacgggtgtttcaatatcatggagcagaacacaaggtcattaatgcatatgaaaacaatgctgaacttacggtagaagccgtgcaagcacaatctcgacttcattatcgctgcggaagtagctttatcctctttaccgtagttgtaggaatgtttgtctacctactcgttccaacggatcctctttggttacgaattgtggatcgccttgcattaatcccagttgtccttggtttatcatttgaagtgttacagttaaccaataaagttcgtcatgtccctcttcttcgctttttaggttatcccggtttatggcttcagcttttaacaaccaaagaaccaaaagatgatcaagttgaagttgcgattgcttcatttaaagaacttttacgcgttgaaaatgaacgttcttctaccactgacgaacaagttgtctaatccacaccgttttgctttctttttttactattttaggaggtgaacaaaatgagacgtccattcgtgaaaccacttgtatatggtctaatcgggttaggagtcattggctttgcatttacgttgattacagatccagctgttttattacgtcaagcaggttatatttttctatttatcattttgttttacttagtttatcggtttattctccgcccttctcagacaaaaggtcaagatagaggctatgtgcgcgcagtaaaacaatcaaaactgcgtcaaaaagaaaaagagcgaggaagcaacaaagttgatatgcatacgtaccgaagctcaaataagcgcccggtatccaaatcaacgaaaccgctaaagaaaaagaaaaacaactcacacttgaccgtcatcgaaggtaaaaaaggaaaaaagaaaaatagagcattcttttaaaaaaacaaggagaaaagcctccttgtttttttaatagcaccattttttcaaaaatgcccttgtacgcttttttccaaacgcaatcagctcttccttccgttcttctgtgagggtaaattctgtcgcaaaaacttgattaacaggtaaaaagataatatttttttcgtgacgttttgaaatatgtcttgcatcgtgcgcatctttcatcgtctcaaaaagcgcgctgaataaaccaacggcatttttaattttattccgttccctttcttcgtccttcgggctcagcttcacaccaattaccggtcgcttcttaagacttttatcatcatcaaacagaaaaattggaaagttgcttaacacgcccccgtcgactattaaactgcttggggtagattttaatttaaccggctcaaaaaaatatggaatgctgcagctcattcgaacggctcttgctacagaaaagcgattcgggtcgatttgatatttaggcaaatcatccggaagaacaagcatcgtactgttggtcaaatctgacgcaataatacgtagcgactgatcaggcaaatcagcaaatgtacgaattcctctgctccgcaatttctcagcaatccacttttcaagcctttctcctttatacaatcccattttccaatataaaaacagccactttgtcaagcttgatggtaaaaaagacattctttgatctaaaaaagacgataactcaatttcattcatcatttcaacaatttcttcacttgtataaccggctgctacaaatgcacaaataatggaacccgcactcgttccggctaaccgccgaaagatcaagcctttttcttctagagcttgtaacgcgccaatcagtgcaagccctttaataccgccacctgaaaacactccgtcgacgtacacagcctctcctccaaactacccactctacatttgtagtcgactcagcaacaagttatgataaaaagaaaaaaagcagtgacgctattggccgctgcttttttcttataatttctgctcttcttcattttgtttttgtacattgcgaagatcttgaatacggttatgattttcttcaaagtattgaaccaaatctccaattcgatcaatggaattccagcttaaatgatgttcaattccttctacgtcatcataaatatttttctcatctacgccaatgatgcgcagcagctgctctaaaagctcgtggcgataaacaagacgttttccaatcttctgccccttagctgttaaaacaaggcctcgatatttttcataaattaagtactcatctttgtctagcttttgaaccatcttcgttacagatgaggggtgaaccgccaatgcatcagcaatatcagacactcgagcgtatcctttatcttcaattagcatatatatttgttcaatataatcttccatactcggtgtaggcatgaaatctcccccaattaatattatgtattgctaataataagtcataaatgtctgtttcttatagtgatatcgtgttcatgtttgataatctatgtgaaaaaaacgtgtaaataaagcgatgtcataagataaaactggataaaagacattcaattaaaatcatactacaatgcttattcaaatacaaggaccgttcgatcccgcttcttatttatgccccatttttatacataataaaagctgactcgtttgagtcagcttttactagtcaatcatgttcaaaattaaaggccgcatttcagctgtgcaccacagtttgtacatgtgttgcatccgcccatttcttctaccgttccttgacggcaaaccggacacgtattacctacttcagaaccgattgttacatcagttgaacgaatttcattaattgtatcaactaacacaacgtgcggtttcgtttcttcttttggcgcttcaatttcttcatcaaacgtattttcttctgcttttagcgttaagacttgtgcatcacggctgccgtctacatacaccgtaccgccttttgctccgcctttatacagacgctcgtacactttttgaacttgctctactgtgtaaccgcgaggagcgtttactgttttactaattgaactgtcaatccagcgctgaatcacacattgcacatccgcgtgagcttgtggggcaagttccatagctgaaatgaaccattcaggaaggttgtttggatctgcttctggatgctgatctaaatactcttgaacgatatcagcttttacttcaataaatttacctaaacggccgcttcggaagtatgagaatgagaaataaggttcaagacccgttgatactccaaccattgttccagtactgcctgttggcgctactgttaataaatgagagtttcggataccgttctctttaatgttttcacgaatatcttcaggcatttttttcatgaagcctgtatttgtgaatgcttcacgtaaagaagccgtttcagcatctgtttcgcccactaagaacgggaagcttcctttttcttttccaagctctacagacgcgcggtaagccgtcgttgcaattgtttcaaacactttatctactaactcattgcctttgtcagagccgtactctgtttcacaataaataagaagatcgtgaagacccattacaccaaggccaacgcggcgttcgccaagcgcttgcttttggttttcttctaagaaataaggagttgcatcaataacgttatcttgcattctaacgcctgtttcaaccgtttgacgtaacttttcaaagttaacagttttcgtttctttatctgccatttgcgctaggttaacagcagctaagttgcagacagagaatggtgcaagtggttgttcaccacatggatttgttgcaacaacgtgctgaccatatgcttgagcatttgtcatatcattagcattgtcaaagaagaaaatgcctggttcagctgagtacgttgcacaaatattaattaagttccatagctcttttgcacggatagtacgatacgtacgaactttgtttccttgttttgcccattcgcgcacatcgcctacttcgtgccagttttcattgtagttagccatttcttcttttgaatagctttctacgtctgggaagcgaagttcgtattctccgtcgttttcaacagcatccataaaatcttttgttaagcatacagaaatgtttgctcctgttaaaaactctgagttatgaacgctgtacgttccgcctgtttgcagcttttcttctgcatctttgatgattttttcactgaacccaccaagaccaggaatttgtttatagttaatgattccttggtacatcgcttcttcagactctgttagcggcgtgaacttcaatttatcttgcgcatgttttttaatcatttcgtcatttgtgttttcaattaagaaacgtaaaatgcgagggttttgcattttagaaataataaattctacaatgtcaggatgccagtcggcaagcatgatcatttgggcccccaatttgttactcttcgttaagaagggtacggtcatttctgccgtactcttacactttcatgtaagatcagactatatcatcaaagaagaaaattcctttgtctcgtgccccatagcgacgttgccgtttgctatggtttactccttcctttgcttccatcataacatctactttattcactaaagttttattacattagaacttttaggaagtttcaatagtcgttgaacctttatcttcgtttccaaagacacttggctgctgattgcccaatctttcctcttttctaaccatcacgctcatcgttgccgatcacgttgtggtgaagaaagctctaagggtgttccagcaattcacgagattacgtcgccggtttgttaacgacgtgacccaccttgctcaacaagatgcgtcagtttagcaatatcatctaaccatgaaaccgaaccagatgatttgccgtttacaccgcgagccagcgtgttgcgggggcgaagagttgaaccattcgttccaacaccgcctccacggctcatgatttccattacttgtttgcggtgttctgaaataccttcacgtgaatcttttacataaggcattacataacagttgaagtacgttacgtccgtatcagcacctgcaccgtaaagaacgcggccagctggtacaaagtttagctgaacaagctcttgatagaacttttcaaaccactctttgcgcttttcttctgttttttccacagaagctaaacctgttgcattacgttttgcaatttgctcgtagaagacttctagaggtttttcaatgacatctaaagaacgagtgattaatccgttttctgcttcttcaggcgataaagctcctctaaactcatcttctaccttgacaacagcggttttttgctcaaaattaatgctttccacatagccaagtcctcgtgctggaaattttggatcttcctttacagttagaacaacaaaatctccttctgataacgttaattttcccgtatctttaaacgcatagcggtctaacattaccaatcttgaaacacctttatgagtcaacttcatatccggtgtaatcggatgtacttgcggaaagcgttcaatatctgaattgagcttttcaacattcatattcactttttgatttaacaaaacagtcattctcacaactccttacctatcgaacatctataaatttattaactctatttccttttaaaggaaatagagtttttcaatcaactatcaataacttaccacacggcttggacgaattcaatatatagtatttggcacttctctaaacatctacatatagaagggtgtcaagtgaaatatttttttttttgtaaaaaaagtgtttgacttttcttccctatgtattctattagccaagcattgtttctaaaaattccaataaaaagtgcaacttataagaagttgcacttttatctatttcccatgggcatccgtttagcgcttaaagttccattcatccgatccgtactttgtacgcgctagttcttctacatatgcttcctcttcttcagacagtgtatacggttctaaatcgatatcaagagcagaagcaaaccctttataaaacgcttcttttgcttcttcaatagagattttgcggcccgcaattgcattaatggctaccgctttagaacgaaatgcgcgctgcattctttctttcacgcgatcatttggataattaaacacgctgaataatttatcttcgtcaatctctaacagaatagagccgtgctgtagaataactcctttttgtctagtttgggcacttccagcaatcttgcggccctctacaactagttcataccaagaaggagcatcaaagcacacggacgaacgagggttttttaagctatttttttcttcttctgaacgaggaatagcaaaataagcctcgagccctaacgaacgaaatccttccagtaaaccttcagagattacgcgatatgcttctgtaactgtcttgggcatgttaggatactcttcagatacaattacgctgtaagtaagctcttcatcgtgaagcacgcccctgccgcccgttggacgtcttacaaagcctaatcctaattcttttactttatcaaagttaatttctttttcagctttttgaaaataaccgattgacagcgttggagggttccatccataaaaacgaatcgtaggtggaatttctcctttactatgccattctaataacgcttcatctaacgccatattgtaataaggcgaacggttgttggaatcaataaatctccactttgctttcatctacctcatcctcagctatatgtaatataaaaaataaatccgttttttagtctaccaaaagattgagctaaggaaaagcaaagagcaacataaaactgtgaattcaaatgtggtagttttttcattttcgggaagaaatccgctagattcaaggcaaaatcgctttacttctaatttcattcacttatataataagagtatggattttgtcgaagaaaggaagaatcagcatgtcagcaattacagcagtactcattttacttggagtaatcatcatatactctgtcgttatgttctttgtccaacgtcgcattatgaaaacgttaactgaagaagaattccgcagcggctaccgcaaggcacagctagttgatattcgtgaaccgaatgaattcgaaaacggacatattttaggcgcacgaaatattcctctttcacagttccgtatgcgcattaaagaatttcgtccagatcagcctgtctacatctattgtcaaagcggaatgcgcacaggacgcgcagcacaaatgcttcgtcgccacggtgttcaagaaatctatgatttaaaaggcggcttcaaaatgtggaacggtaaagtgaaaaagaaaaaataatggtatgtatatagaaaaacctcgcctttgggcgaggttttttgttagacgttttgaacagcctgttctttctgatagcgaagaactggctttctcgctgccagcgtttcatcaaggcgcttcacaaccgttgtatgcggagcttcctgtacgacttcaggcgtttcttctgcttcttttgcaatttgaatcatcgcatcgataaacgcatctagcgtttctttcgactccgtttccgttggttcgatcatcatgcactcttctacgataagcgggaagtagatagtcggcggatgatagccaaaatcaagcagtcgtttcgcaatatccaatgtgcgcacgccaagctttttctgacgtttgccagataaaacaaattcgtgcttacagtgacggtcaaacggaagctcatagtgttctgctaaacgacgcatcatatagttggcatttagcacagcgttttccgtcaccgcttttaagccgtctggacccattgaacgaatatacgtataagcgcgaacgttaataccgaagttgccgtaaaacggctttacacgtccaattgactgaggacggttatagtcaaagtgatagccttgttctgttttcacaagcactggtttaggcaaatacggaattaaatctgcttttacccctaccggaccagagccaggaccgcctcctccatgagggcctgtaaacgttttatgaagatttaaatgaacaacgtcaaaccccatatctccaggacgggctttacttaatactgcgtttaaatttgcaccatcataataaagctttccacctgctgcgtgaacaatttcagccatttctaaaatatcttcttcaaataatcccagcgtatttgggtttgttaacattaaagcggctgtatcttctcctactacgcggcgtaaatcctctaagtccactaaaccatgttcgtttgattttaccgttaccgtttcaaatcccgcaactgttgccgaagccgggttcgttccgtgagctgagtctggaacaatgacttttgttcgctgcgtctcaccatttgcttcatgataggcacgaatcatcataagcccggtccactcgccgtgagcacctgctgctggctgaagtgttacttcatccattcctgtaatttctgttaaatgctcttgtaaatcatataaaagttcgagagcaccttgaaccgtttgctcatcttgaagcggatgaatatgcgcaaacccagcaatgcgtgctgcttgttcattcacttttggattatatttcatcgtacatgaaccaagcggataaaaccctgagtctaccccgtgatttcgttttgaaagcgcggtgtaatgacgcataatatcgagttctgatacttcaggaagctcaggagctttggtacgcacatacgctttcccaagcagttcttcagcatttacttgcggcacatctaactctggcaatgaatagccgattcgcccttctttactgctttcaaaaataagtgattgattttgattaagcatgaagatcccccaattcatttacaagttggtcaatttcctcttttgtacggagctctgtaaaagcaagcagcatgtgattttcaagcgcttggttatcacggctaagatcataaccgccaattatttttgatgctaataaatgattgtttgcttctgttaccgaaaccggaagcttcacgactaattcgttaaaaaacggtccttcaaatgctacatttaccccttttgcctttaacgcttcatatgcataatgcgtttttgataagttttgcagcgccatttcttttacaccttgcttgcctaaagctgtcattgcaactgatgctgctaaagcatttaacgcttgatttgaacaaatgttagacgtcgctttatcgcggcgtatatgctgttcacgcgcttgaagggttaaaacaaaccctcgcttaccgttttcatcgaccgtttgccctactaatcgtcctgggatttttcgcataagcttagacgtagttgcaaagtatccgcagtgcgggcctccaaattgacttggaataccaaatggctgtgcatctccaatgacaatatcagctccgaattctccaggaggcgtaagtaaacctaatgataaaggattgcttgaaaccacaaacatgcatttttctttatgggtaatttcttcaatttcttttaacggctcgatttgtccgtagaaatttggatactggacaataacagctgccacgtcactccccatctctttttctaatgcaatcatatctgttacgccgtctgctgaagggatttctaccacttcaatgtattgacccttcgcatacgtttttaacacatctttggactcagggtgaacagccgcagagacaagtacttttttcttttttgtttgacccgcactgagcatagcggcttctgctaaagcagttcctccgtcatacatagaagaattagccacgtccatccccgttaactcacaaatcattgtttgaaattcaaagatggcctgaagttctccttgagaaatttccggttgatacggagtataggccgtataaaattccgaacgagaaataacatgatcaacaataaccggcatgtaatgatcgtaaactcctgctcctaaaaaagaagcatagtcttttaaatgagcatttttagcagccatactatttaattcttttaacagctgaggctctgaagccgcttttttaatattgtattctccttgaaaacgaacgcgctgcggaatatctgaaaataaatcatcaacagatgaaacaccaattgctgctaacatttgctgctgatcttgttctgtcattggtaaatagcgatgtaacatgttaaattcctccccaaagcttactttgaacgtttataaaaaggtgttgaaaccacttttgcttttaagcgttttttccgaacctgcacttccacttcttgaccaagctctgtatactctgctgacaatagtgctagaccgatgtttttccttaatgtcggtgactgtgtacctgttgtcacaaatccaatttgttcttcatctgcaaatacttcgtaaccgtgtcttggtatacctttatcaatcatttcaattcctaccagcttacgaggtgccccgctttcacgctgttcttttaacacttcttttccaataaagctgtctttgttcgtttttactgcaaatccaattcgagcttcaatgggcgtaatatcttttgaaagctcttgaccatataaagccaaagtagcttcaaaacgaagcgtatcgcgagcgcctaatccgcaaggcaacacaccttcatcactgccagcttctaaaatagccgtccacaagtgagaggcgtcagctgaagaacaataaatttcaaagccatcttctccggtgtacccagtacgtgaaacgagagcttttacattcgctacttctacatcatcagcaaatgtaaatggctttaacaaagctaaattttcgttcgttaacgtttgtaaaactttttctgctacaggaccttgcaaagctagctgcgcagtttcatcagactgattaacgagcgttacatctccttgtttgtgagataccagccactcatagtctttttgaatattagcagcgtttacgactagcaaatactcttgatctgcttttttataaatcagcaaatcatctaccgtgcctccgtcttcataacacatagccgtatactgcgcttttccatctacgagggcagaaacgtcatttgtcatcgtgtgctgaagaaaagctaagctatcagctcctgttacaagaatttctcccatatgagagacatcaaaaaggcctgcctttgtacgtacagcttcatgctcttctttaatagaagaaaattgaacgggaagagcccatcctccaaaatcaattgttttggcaccatatttttgataggtatcataaagcggcgttttgtgtaattctgttgtcatttttatgtcctcctctttttcacgtgaaacttttcataacggggagttttcaaatagtgtggggatcactatgtatccaaacaaaaaaggacagaaaaccccctactgtatttagtaggaagtctctgtccttttcacctgaaagtttacctataaacgaataggtttgcctcgtgggtggtctataaacgtatagacactctccagagctgcgtcaaacaagagtctttttgcctgagagattcacaattttattgcttgctccttcggcgctacattcaagtagtctctccccgtgtcgtcattcgcttctataaaattggtaaagttgggcatactactgaaagatgtatctatctttattcacacaatcatttgtaaagtgctaatctattttctttttcaaattttctaaatatatttttatcctacctgattcttatcatttgttcaataaaaattttttacaaaggagcatttttatcatgaaagtgaaattaaacatcgatgaaacatgggaagcagccttctcaactaaattggagcaagacggaccctggtctgcatgggatttgtataaacttgcctatgaaatagaagaccaaacgcttatctcagaatttgaaggactacaaagcccaaaacatctagccgatttaacgccgcttcctcatcagctcgaagtagccaaacaagtagttgaaacaatgaatggaaaagccattttagcagatgaagtaggactgggcaaaacgattgaagcagggttaattttgaaggaatatatgattcgcggacttgttaaaaaagttctcattttagttccagcttcgcttgtttcccagtgggctatggaattgaaccaaaaattttatattcccgcagtccctcaaagaaaatcatatgtgtgggatcagtgtgacatcgttgtgtcttcaattgatacagcaaaacgttctcctcatcgagaaattgtgctagaacaagactacgacctcatcatcattgatgaagctcataaacttaaaaacaacaaaacaaaaaactatgaatttgtgcaaagtctaaaaaagaaattttgtctgttgctaaccgcaacaccgattcaaaatcgaattgaagaaatttttaacttagtctctcttttaaagcctggtcatctcggcaataaagactatttcgaagaattattttccgctaaaaaacgctctttgcaaaacgatgaacacttaaaagagcttgttaacaaagttatgattcgaaatcgccgccacgatacgggtatcgaatggacgaagcgaattgttcaaaccattcctgttgaattctcgccgaaagaacgggagctatacgatgcgattacatcttttaaaggaaacggactccacccttcaagcgctttttcaattttaaccctgcagcgagaggcctgcagcagccgtgaagcggtgtatatgacattaaaaaacatgctggaacgtcaggaagatccaaacagcgcattaacggaacatatgattactccgttaatggaactacttcagcaagtgccgcaaaatgcaaaagcagaaaaagttctggagctcgttcaaaaaattgatgacaaagtcattattttcactgagtacagagcaactcaactgtatttacagtggtatttaaaacagcacggaattacctctgtaccgtttagaggaggatttaagcgaggtaaaaaagactggatgaagcagctttttgaaagccacgcgcaagtatttattgccactgaagcgggcggagaaggaatcaatcttcagttttgtcatcatattattaactatgatctgccgtggaatccaatgcgtctagaacagcgaattggaagggtccatcgtttaggtcaaaaacatgatgttcacatttacaatttagccattcaacatacggtcgaagaacatattttaaaattgttatacgaaaaaataaatctttttgaacgagttgttggagagttagatgatattttaacaaagcttgatttaaaaaatatcgaagagcatattcaagatattttatttcattcacggagtgaaggagaaataaaaatcaaaatggagaacttgacgtctattattcaatacgaagacagcgaggaggatcagcatgcagcaaactgatattcatcaatttttaaagcgttactttctagctaataattgttctattatcacagaaacgccatcttatctaacggttcaattaacgatcgaacttgacaaagagttgatgaatcgtccattttattggcattatgttgaaaagacaggcggagaagcaaatcctgcttcactcactttcattacagacccagcgtttgaagatgattctgttcaaggagaacgaattcattttggttcacctaggctgcatcaaattttcgcttctactcaaaagctaggcggatttattcatctgtatgaacaagttgcatcagcacagccaacaaatcagcctttacacccttggcttgcgttaaatattaaagtctcgtacaaatgcgatcgtaaaaaagatgagctcttgtcgcttggcattaatttaatcaatggacaaattattgaatcctttcatgaattaatcattcatcaaaatttatcatctaaaatctcagactattgctttactctttcaccttttattaggccgaaaagtgcgattgcacgactcacatcatacgtgactgactatgttaaagctcagccgactgaatgggcagaaaaagcgcaggaaagatggtatgaagatttagcgcttcttgatcatttttacgaaacagcagaagagctgccagaaatatatgtgaccgaaaaaacagcgcttcaagagctgtacgaaccgactatattatttaagtttataaacggtggcttattttacatatcgcctgaaacgatgtctcgtcaatttaacaaaacacaagccggttaaaaaaaagatgagcatatgatatgctcatctttcttttttctttcgataccacagcataaacgacagcggaatcactccaaaccatctgtttgcaaaaggtgctcgttcttcttttttttgaatttttttcgttttcctctcttcttttggctgatccatatattgtacaaattgctgagtcatatattttacataatcattcgttttcatataatcatctcctcagcactattatatccggagagaaagagacttaatccgtccacttcacaatgtgctgatcctttttttgaatatatgcggtttctgtcaatgctcttccttgcagtgtttgacactttatttttaggataatcatctgttcatcttcacttactacttcgtatgaaaccgtacccgtttctaatattaggggtgtagatggagatttactatgttcttttatttcttttttcacatgtacaaccgcgttttctaaaagatgctgcagacgatttttctgctctacttcttgataaaatgaacttttcgtcacaaaataagtggtttgctgagctactaacagaagaaaaagcgcacaaaatgccaaaacaaccgggagaacaaacccttgctcattatgtttcataagcaagcatcaaaaacgtcgtaatggtttcttctctaactttgttaacaccgtctgttgaacgaattaacagcctttctttttgctgttcatacataatattcttaatgtgctgcagcacaacttcatgaccgctttcatccactcgtcttcttatcttgtcttcgtagcgttcataagtgatgatctgattattttccattttaaacgtaagcgtagtcgcatgaattctcacttcttttgcttctcgatattccatagcaagttgattcacaaaaatttcccactccatttcattcatactaaagtctggattatatgtttgcttagctagcggaataataatggggaaaaatgaaacaatgagcaaaaaaagagtaaaactgactaacatctctacaagcgtaaagcctttttcacttttcacttcaacatcacatcacacttctttttcattttatcagcggaatctgtccattctacacaaagcttttgagcactttctccgttccatttcagataaaatgcaacgttttcctttacgattttttctcgccgtttatatcctgtttcatatttatatttcaatagctcttcgtgcaagatagcatcggcttgatacgagacatattgcttcttttctgcttccttcatctgaacatacaaaggaataattgtaccggttaggagtaaaagcatgctaaatgacacaagcatttctaacaaggtgtagccctgctggcccttacatcttgtccacataaaaacgtcctctacctatttgaaaagtaactttgtatttaaatttttggctgctgataaaaatggtctttgcttgagaaatattgccgtttttgttgtattgtatcgtggaattaccgcttccaaacgtgatatgaatggtggagtcataggcacgcttataaagaacggcacgagaatcagaaacaatatattctgttccctttggtgcgaagttaattttaattggagattcgcggttcatggctgtctgctgcacataaaacgtgtcactttgcagctgtcgcaagaataatgtgattttgtaatattccacaagcggccgaatggttacgataatggaaaacatcatcacttgcacaataaataaaaccatcagcatctcaatgagggtaaatcctttttgcttaagaagaaccactagccgtaacctttccggtaccgtcaatttgaatagcttgaccatttggacacacggtgccttcttttaagtaacctcctgcttcaagctcttctagacttggtttttcgccgttttcaagttcatatacttgtacctcagcctctacggttttgacaagagctgagcagcctttattgttaataaccgtattatgctttaatacatttggaatcataatgagcaaaagcacggtaataacgagcataacaatgagcatttcaataagggtaaatcctttattaccttttagaatcatattctttcccctttctacaagctcgacatcacttctaacatcggaagcataacggacatatacataagcagaatgacaattccgatgaataagaatgtaagcggctgtacatattttaaaatacgaaaaataaactgttctattctttccatcataaatagactgtaatcatacagttcttgagaaagctcaccgttctgctgaccatgcacaataacatgagccaagtctttttcataatgagatttacctgaaacgatatgatctaatcgcattcctgaggaaagttgatctgtaaaagcaaaagcttccacttgaaaaaacggatgatgctcttgcttttgaaaaagagcaaagcattcataaatagataaaccaccatttagtaaattgctcatatgaacagaaaaaaagtacgagttaaatagccgtgtgaacgttcggataacgggaactctcataaaaagctgcatttgaactactggaggcaattttttaatgtacatcacataaaacaaatacaggatgattggcatactgatgactgcaggcaacacaaaaggaaagaaagacatcgcctgcataaataagaggataaacgaagactgcttgtttccaaaggataagtacagagcttcaaactgtggaagtaaaaccgtacttaaaacaaataaaatggaaagaataaacagcagtagcaatacgggatattgaacaagcttttgaaattttttacgatgccttactttttcttcaatcattgagctactttcttttaaagcaaattgaaggtttccatgttgctccgcaaaatataaatagcttaaaatatcacggtgaaactgaagtttaacaaaagcatcgtgcaaagattctcctcgttttaactgctcaagacatttttcaatatccgttttttctttgttagatacttgaaacgtcaaaaacgaaagagcttgagaaagagtgtagcctttttctaagagcttagagacctgcttaagaattttcgcttgttgagcaagagaccaccttttttgtctatttgtctttacccccatccgtctagcgaatgcggatataaatagcctagcgcgattccttttagaataacatctcggagcgtcttataatcataatccgcattttctcctttcacttctctcatcactgcgctaagctccttgccataaagcaattcgtatatgctggactgacgatgttttctcatttttttacaagcggggtggcattttccggaacacagcggacagcgaatttctacaaggcgctgtgcagctactgctacaagggtctgttccatttcttgaaagctaacgccaaattcaagcagcctgtacaaagatccttttgtatctttagtatgcatcgttgtcaaaaccaagtgttctgtcatgataataggacacttttaagctgtttttgaacgtcaaattaggtaattaacaattgtaaggctgctttcgttaacataggcaacaattgaataaacacataagcgatacttgttttnnnnnnnnnnnnnnnnnnnnnnnnnnnnnnnnnnnnnnnnnnnnnnnnnnnnnnnnnnnnnnnnnnnnnnnnnnnnnnnnnnnnnnnnnnnnnnnnnnnntctcctcgtatattatatttaagccctatttaggagctaagatctgtttccatattaattaataaactaaataacatattacttggatgtctcaagatatttctagataatgatcataggatcatttgggacaattcttctttctcctgtggattaaccacaatgtaagactgtttctcagtgaacgcgcgggactccctactcgcaggctgagcagcctgtcattcgaacctagagggtagtagctctatggcggctttcgaatgcaggggaagctctgatacacgaggttgttggtcggcgtacacactagagatatctcgagacgtccaaggaaatgccaagtgattctaaatcgaaaggaggtctctcccgtgagattatttgttggtttagatgtaagttcgtttgatatgaaagtatgcattttaaatggtgaaggagaaaagctgaatgcctttaccgtcaccaatgacttaccaggcgcgacgttgcttaaagagcttttattggactgcataggcgatcaagaagttgacgtcttaaagattggcttagaatctacatcggtctatagttttcacccgtcgatgtttctccatcatgatgaagacttaaaagtcttcggtgccaaggtgtttgtcatgaaccctaaacaaatagctaattttaagaaaagctattcggacatgaacaaaacagatgaaatcgatgcctttatcattgcggattacttacgttttggacgtaaccagatgtcagtggtcaaagaaagccaatacgtggccttacaacaactgactcggtcccgttaccaactcattcgtatgatgacaaaagaaaagcagcattttcttcaacacctaagctataagtgtaatactttctctcaagaagtagactcctcggtcttcggtaacgcaatgatggagcttttcttagagaaatacagcttggaagaactagcccacctaccactggaggaactagcagcattccttcaagagaaagggaaaaaccgatttggtgacccgaaatgtgtggcaacctccattcagaaagccgtgcgatcttcgtatcgcttggacaaggtagtggaagattccatggatgtgatacttgggacctcgatcgaggtcattcgcaccttccaaaagcagataaaagaaattgacaaagcgatcaaaaaactgatggctggattgacacacacgcttgaatccatccctggcattggtcccgtattcgctgcgggtatcatagctgaaattggccaaatagaccggtttgatgatgaagctaaagtagcaaaatacgcaggtctatactggcgaaagcatcagtctgggcgctttactgccgaagacacgtccctatcacgtaacggtaaccactacttgcgatattacttagttgaagccgccaactccgtacgaaagcaagttccagattaccgggattactacgtgaaaaagtacagtgaagtaccaaaacatcaacacaaacgtgcactcgttctaaccgcaagaaaactcgtgcgattggtggatgcgctactacgcagtcaccaactctttacgccagaaaggggcgtgaaaatatgacataaaacttgtcatcgctacctttcaaataatttccagtaaataacattcgttactggtctagtttcgtgatgctttttttaagtaaattgccctttgataactttacgttctttcatttttcagttgacatactaccgcaggtctttnnnnnnnnnnnnnnnnnnnnnnnnnnnnnnnnnnnnnnnnnnnnnnnnnnnnnnnnnnnnnnnnnnnnnnnnnnnnnnnnnnnnnnnnnnnnnnnnnnnnttagtcaaaaaaatggtggtcgataagattagtccaaaaccaaaagttgatagtgtagaaatcgtcgaaatcgaatttaactaggcgatttcttaacgtgcattgtcctattatcaaaacagaatgtccggtaagcgctgctctcacagcaattttggcagtctcactatctcttatttctcccaccatgataatgtctgggtcatggcgcaatatagcttttaaaccagtcgtgtacgtaatccctgcccgttcatttacctgtacttgaaggacggtttcgctcggtttttcaataggatcttctaatgtaataacatttcgattaaaaaggtgctttacttcgtgtaaaagagtatatagagtagtggttttacctgatcctgtaggaccggtaaaaataattaatccatgagagaatttcaagagagaaataagctttttagtatgttcaggaaaaagagataaatgtttgagagatgtagattgttgatgaggcaaaagccgaataacaagactttcatcatgagaagtaggaagagttgataaacgcaaatttacttgatagtgatcaatggaagtggtcaatgcaccattttgaggttttctgcgctcgccaatatccattcctcctaaaaatttaaaatgcgaaatgagccgttcagacatttcctttgaaataaccctctttaaaataagctcttggtcaattcgcagctgaatcacagcatctttctttcggggcacaatatgcacatcagaacttcggcactcatatgcatctcgtataacgtaagtagcaaactgttcaatttcggtcaaacgatcatcactcctttatttgtaatcaagatgattggtaaaacatctagaaacagtaatttcgacctttttcgagattttcctccttcttttttcattttttataattttttagtatacgcttcttttcttcgcttcagtccttgtacacgatgtacaacttctgtacatctctaaacgactacataaaaaaagacaacgtgatgtaaaactcgacgctgtcgttttattcattatttactgaattgagcttcttcatcatgtacgcttacacaactagagaagcaagacttgtttttttcttgactaaatttttaagagcagattcgttatagcctactacaagctttttaccatctgttaaaattggtcggcgaagcaaacgaggatgttcaattaatagattgaccacttctgatagcgtcatgctatccacatcaacatttaactttttatattcttgacttcttttagcaagaagttcatccatcccttctgttgtcatagaaagaagttcaagcatttctttatgagtaggtgtttctctaaataaatgacgctctttaaaatttacatcttccttcactagccactttttcgttttacgacaagatgtacagctcgggtacgtataaaatttaatttcttccatatgaaaccctcccgtttttttagttatagattgtttatatacattgtacacgttttgtataacttttgtatattattttgcacatgttttgtataactttttttcttctgtcgtatttcaaggaaaagatagcgttttcaggaaagaaaggatgtattataatggaaaagtatcgatatagtttcataagtgctttctagtgcttacacagcgatgacattcatcatgacactaactaagtttgataaaggaggaaatggacgtggaacgaatgtaccgtgtaatggggttctggacagcaattttcactgtaatgttttacctcggtcacatgcataagacttctttactctttttagctcaaacaggcttttttgtaattcttagttatttaaagctgtctgaaagaatgtacatttacgttttcggagcatatttgaccgtcttttttgtggggttcacgtactggtcaacttttatgatgacaccaggacagtaaagagaaaagcgatgggcttccatcgctttttgtattcttaaaaaccatttaggaaaggattttgatccatttcgtgtcccacagttgtttcaggtccgtgaccgcttagtacaagcgtatcttctggaagggacagcaatttcgattcgatgctttctaacagctgagcttgattgcctccaggtaaatctgtgcgtccaatgccgcctgcaaaaagcgcgtcaccagatactacaaagttacccggtttaaaataatatgaaacgctacccggagaatggccaggcgtttcgtacacctcaaattggaatgagccaattgttaaattgccttcgattgaaataatatcagttgcatctggagccgtaatttctcctaaatcaaaaaatttcgaaccgtttaaatcactattatgaagccattctttttcatttttatgtacataaagcgggatagagtagtgattcatcacttcatctactcctccaatgtgatcaaaatgagcgtgtgtcaacaaaatagccaacggtttatacgtttgtttttctagaaattcaacgagctgtttcccctgagctcccgggtcaaaaactaaacactcttttttttcgttagcaacgacataacaattcgtttgaataggtcctagcggtatacgatgatagttcataatgtatcctccttgtaaaatttatttccgttatatgcattatcatacacacatcatcttataaatgaaagtaaggacctttctaagctaataagacgaaagaaagattggttttcatctcgacaaacggttagaaaagttttacaattgaagggataagctaatgatagcgctttaattttaagttacctaaaggaggtttcttcgagtgggtcttatgattatttttgcactaacaacattgctaggcgtatttgcagctatttcatcttttagaaataaaaacatattaggcattggtttttcggtactaacattcggtgtgttcggatggtttaccgtgatgaccattatacatcacggttatccggcggtacatcattaaaaaagccacgcaaagcatatgctttgcgtggcttttcaaatagatagatattccattgccgcaactaaaatagctttagtcggattatatacgcgcgatatttgagatagaggcagcggattaattcctttccccagttctaaagtgaaccctagctttttcttttctaaaataaaccaatccttaaatccagcgtgactatcaatcgttttgactgctttataaccgcttaccctttcaaaataattggctatttcctccgcttccttcggctcttcattcatatacccccagtaaaattcttctccttgggtatgtaaagctatcacacaatcaaaatcatgacgctcaacgagttttaccattgcctgcgcttcaggttcagacagagattcatagcctggaaagtcccgataatgtggagctttaggttctttgcgctttttttcaatttcccaataagccggaaactgattgtttaagtctacccctcggatatttgctttccagctttgaaaatcaggaaaatctcttcctattttagaaagaaaagacgcataaggttcacttacagcaggaccttttaagaccaaatctactccgtctggattaacaatcggaaccgcagaaagcgtaatttgattaaaaagagctcttgcttcctgcccgttcaacgccttgtcgtaatgaagagcagctaaataatcttcaacaaactgtagaagaacatttgtcgtaatccattcattggcatgaaaagacgcattaatatgaacctttctttctccgtttccaattaaaatatgaggaatcggctttccaagcacgctgcaccctatccattcaagagaaccataggggtagtacgtcaaaagtgtttggatatcttgtattgttcgcatgtaatcgtagggcttttgaatatctacaatttgcataatcttcactcctttacactatgtatatgtaaagattgaaaagatgcatgataaaaaagcgctttgactaaatgtcaaagcgcttttttatctcagttagattcttgcttattattcaaaataagatttaactaaccaagctcctccaataattcccgcatcgtttcctaaagtagcgattgctagttcagcaccttgcgctacgcgaggaaatgcaaaacgtttgaaataatctcttaccggtgcaagtaatacctcgcctgcacgagacacaccgccgcctagaacgatcttctcaggatttaatgcattagcagagtttgctagtgctagacctaaatgaaaagcaactttatctacaacatgcatagctaactcgtcttttgaacgagctgcatcaaatacatctttagatgtaacttgtccattttgttctaacactttgcgaagctcacttggtttgtccgtttccgttaattcttccattgttaaacgtacaattccagttgctgaagcaattgtttctaaacagccggttttgccgcagttacacggtgccccgccttcaggaatagaagtaatgtgcccgatctcaccagcggctccatttacgccttgtacaatttcaccgtttgcaatgacgccaccgccaacgcctgtgccaagcgtaacgcacagtaaatcttttgctccgtctccagcacccttccacatttctccaatcgctgcaatgtttgcatcattgtctactacaacaggaagagaagtttctacttccaagatatctttgatagggaatttttcccaacctaaattgacagctacttcaatcgaaccgtttgcaaagttaacaggccccggtgcaccaataccaattcctactaaccttgattttacttctccaagatcgtttaactttttatcaattgcttttgcaatatccgttggaattttacggccttgctcgctcacatccgtattaatttcccacttgtgaatgatttctccataatgattaataaaggccatttttattgttgtaccgcctaaatcaactccaactaaccatttgtcatccatgttcattcatcctttttctctttttgttgttttaactctcgacgaagcaaaagaattgccatttggtaatcacgtacatcaatcaagttagactgatataactcttttacttccgcttccatcagctctaaatcagcaatacgatcgcccacgtatataaaaatgccgaaggactttaataattgttgtacatcatataacgtattcattctgtcacctttatcctattttttaggtgatatgattcatttattttgagataactcaacagtcattcagtcataaacagcggccgtatttaacgcccactgctaggtctacatattaatattctagtaaacgttctcacaatagtaaagtataaaatattaaattcgtcattcaacagttttaatttcctatctcttgcttcagcttttcgtatttttcattttgcggttcaagcgcaattgctttatcgatattttgtgtggccgctggaatatcattcagtttcatattcaccagagctaaattgtaatacgcctcatgaaaagttgaatcatactttacagcttgattcaattgctgtttagcttctttataattttcaagataaaattctgcgttagcactgacgaaataaacgttactatttcctgttcctttttcaacaaaaagcttaatggcatcttttgcttcttcatactgcttctgctgaagatacgtggccgctacgctaagtgcatagggctcatcttgataaacagaacgctcatgatatccataaaaaagcagacttcctactaataaaagcgtgcaaatgaaagccggaatctgaacatacagctttttttgtttcggtaaactgacgatgctcgcagctaaaaatccgccaaccaaaccgccaatatgccctgcattatcgacgttcggcgcaacaaatccaaaaatcaagttaatcacaatgatgacaatgaaactcgatcccattgttcgaaaaaagaagcgtggatttgttcttgctaaaaacagtaaagctccaaagcaaccgaaaatggcccctgaggctcctgcggaaatggacgtattccatataaaacttcctagagatcctgcaaacccggcaaatatataaataaagacaaaacgcccgctgccatatatcctctctacaaccgttcctaaataatacagggctacactattcataagcaaatgcagaagtcctatatgcaaaattataggtgtaaaaaaacgccaccattcgccttccataattaaggggttgtatttagctccgtattgaatcagagtgagcgtattttgtgtactgctcttccattccagaaatagaaacattaagatttgcagcgctaaaaatatatatgtaaaaataggcttcccgtatccagctatttgctgttcttcgctttgctttttctgtacaaaaagcacaattttatgtttccactgctctattcgctgtgcttcttcttcggaagagaaattgtctgcgctttctaatataagacccagccgttcgaatagaggttcataagcgcttgctttctctgccgttaattgttcaacgtaactattcaccttagagggacttggcgtactttctaaggactgctctgtataaaaaggatcaaaatcagcaaagtaaatcgtgttaagagtaagcgttgatttacctctttgctttcgcaaattctcagctctttgtaatgcatacaatacatctttttgctgctcaacggctgatttaaaatttcggcggactatgcggacaattgacttatctttgcgatgcgaagattgaaaccatagctctgaagcatcagctttcatcgaaatcaactcatatgaagaatggccaagcaattgctgtgccagctgcaaataataaaaatcttgcctagacaaatagtcacctcctcatactctctatatgtaaagatggcagaaagccaggaaaaaagcaacgattttccctttttctttttctacaaaaaaacaccttacaggtctgtaaggtgtttttttatgtatctttcgctcttagcggaagacctgcttcattaaacgatcccgaacaaacggcaaattaaaaaatgaacgaacagctagactgcggataaatgaatttccaaacagcgaatttaaaacacggtatctcatttgatagcccagcgttccaacaactaaaagcgtaagtactaatataatatgtctcattttcaagcctccttacgtttactttgctcctatgatgaacattttatgctcttatataggtaaaagcaggataaggattccgcctgtaaaagaagcaagcaaaatagcggcaagatttacaacatcattgttaaagaaagttattcctttctcttttatcgttggcttacggcaatgatctttccgttccgtttcaataccgcagctttgacagtgaaagcgaacttgcacacttgctccaagaagagtgtctatagcgtttccaataaaaccaaagcacccgactagcaatatactacttagcgatacggatggaaaagcaaaataacaagcggcagcaataagaaaagctccggctgctccggctgctgtacctaaaagtgaaacggctcctgaggtacccgcttctactctctttaacgtccaaaggtaaaatggcggctttttactaagagaccctatttcagatgcccacgtatccgcattagcagctgagatgctgatcataaacatccacatgtaaacaggaaaagctgttgcagcatataacacaccgcaagcagcagctacacctccattagcaaggacttgaatataatctcgcctgtcgtgcttctctaacttttcttctaatgcacgttttttttcttttttgtacttactacacaacgtagaagtgctaaaaaataagagtaagagtaaaaaaccttgaagcgaaaaaccgatataaacgctcgctcctacgataaaagacatgcaggctcccgatactgtcagtgcttttgctatgtagcctgctcctgccatgagtaatattacaattatcatgacagcatcaaacggattcacagcaaataagctccttctctgtcaaaatatattcaacgggaatatcatgagattcatatgggacctctgaaacgacttgacaatcaaacgcaaggcttagcttctgtccgctataatctgttagataacgatcgtaatagccgcctccatagccgatacgatatccatttttgctatataccacgccaggcacaaggagtaaatcaattgaagattttgaaacgggaacagtttcttcaacaattggctccgctaacccgtagtacactgtttcaagctgtgaaaaattcgtaatctcgtagaaaaccatttgagatgttgtggggttgcattttggaacagctactttctttccatctttccaagcacgttcaatgatggctttcgtattaacttctttatttcttgaaaccgtagctgcaatgactctagcttctttccataaacaagtttcatacagtgcatttgctatgcttgttgaatgtgcctcgtgctgctcttcagaaattaaattaagaacccgcttcatctctttgcgcagatgagatttcattttaatcccccctataaaaaaaacagcaggattgtactcctactgcttactttgtttcacgatgaagtgtaacttttttaagtcttgggctgtatttttttaactcaagacgatctgggttattacgcttgtttttagttgtaatgtaattacggtcaccagtttcagtgcaagctaatgtaacgtttacgcgcatctattttccctccaaacattataaacataaatcagactttaatataatatcatttttcgaaaggaaatgccagtctgtttttttgaagaaagtcatttaatttcatttcttcactttttctttcctcttagatccctgagccccttctctgctacgccttatatatagatgaagtttcttgaaataagcggaactctttttatgagaggcgtacttcctttcttttaaataaaagccattatttacactctttgatactcttgtattttttctacaaaatatgccgacagcttcttggcagtctgagtgttcaacgcctctgaataaatatttaatacaggcaagtgaccatcgggcaaaataagcgtccattcatggggatcatggtaaatctttaagccatcaatgacatacacttgtttaccaattgcttcttctaatagtttcttcatcacttgttcttgaatttctagcggacatgaaatgtaccgccagttcatataagcgtgcgggacatattgaatcatttcagaaattttccgctgttgcaccataattaattcgatcagctgacataaagcgtacatggcatccaactgaaattgaacgggccccaaaagactaagcaaatcacgtttttttgcttttgtcctcataaatgattgattgagagattgagcaaatgtttctagtgtggatgaatagtgtataggaataggaacgaatgctgctttttttgtcatgtatacgctataaatatagagcgacataatttctgagtcatttacgctgcagcctttttcatcatatagagcaaatgtttctccatcttctttaatctgaatacaaaaagacagcttatttcgtttaattattcgtttgatttcttctgttttctcccatttgtttaaaaataaaacatggacacgaagacgcttacataatagttcgacaactttctgtataaacggcgaacaaatcacgccaatccgcgtactgtcttctaacaaaacatgctgattaattgattttactaaagcatcacaatattcttccctgatatttcttatgcttgtttttttaagtgaaacagaagttgttgtgtttgcttgtttagcttgaaggtacatccgctcaatctttttttcaataagctgattaactaattgccctttcttgtcatatatttctaaaaagaggccgctgtttttgctatccacaccaatataaataccaatgctcgcttgtgaagtcatcatgtaatatcgaaataccggaagagcttcttttttaatatcatacacagctgaatgattactccgtaaaaaagaaaagcattctttgcgaagttgaatggcttctccttcatcatcgcttgctagacagaacgccccttggtgtttgcatacaagtaataacgcattgtacagtctttctcgatcaacagatgaatgtacatacaggcgaccgtttttgaagatagaaacatctggttttacagaaagttgaggtagtacttgattttcagctactgtatcttggacatacgtagtcattgcttgaacatttacatagggacctatcgtagcattgtataaaaacgattctgcccccaccgttacgttttgaagcaaaattgttttatcgattgcagcatgtgcttctatgatactattggttccgataatcgtgtaaggaccaattgaagcaccttttctaatcaccacattttctcctacgtaaaccggatcgtaaatagtcaccccttcttctataagggcgtcatctgagacaacactttcctgtctattgccaaaccacttcctccacaaatcatagtgtgcttgacgataatggtggatttgcccaatatcaatccaataatcttccgttacaaaactgcacacagtatgattatattccaaaagaagcgggataatgtcaaagctaaaatctgtaggaccataagaattcacgtaatcaagaacggattttttgatcacatacactcccgtattaatcaatcggctattggcctgttcgtaggtcggtttctctacaaattccgtgactcgatgcccttcatctatcgtcaccactccataaccccgcacgtcgtttacttcttttgtaacaatggtcatttcgcttttttgttcataatgaaaatgaataacgtcttgaagattaatttctgttaaggcatctccactaataataatacagtcttcctcaataaaggcctctgctcgcttaattccgcccgctgttccaagaggctctttttcgataaaataagtaagcgtcactccccactgagagccatccccgaagtattcaataatttgttcatgcctatactgcagcgtaatcccaatctctgtaattccatgtttcttaagcagttcaatgctatattccatcacaggtttatcgtaaagcggcagcataggctttggaatcgtataggtcaagggctgcagtcttgttcctttaccgccagcaagtataatggctttcaattttttgcctcccttctttttttatcctggcaaatctgatgttgaaacagcttacttgtatcaatagcgattttttcccagctaaacatagttgttgcttttctatacccattttcgctgatttttgcagccgttttttcattttttaacaaaaattcaatacagttgattaattcgagcgtatctcctcgggcaaacgtcagacccgtgtcgaaatgtgaaacaatatcgcttagacctcctgtatcggcaacgatagttggcttcttggctaccatcccctctaaagccacaattccaaaaggttcatataaacttggaaaaacaaccattttgcaagcttgaagaagctgatttcgttcgttatcggtaatgtatccaataaaatacacgtatttgtctagttgcttttcacttacctgtgttcgaaactcatgaagtaaaggcccttttcctgctacaacgaattgaacatctatttgttttttcttaagtagttccgctgcttcaataaatagctgaaatcctttttcatatacaattcgtccaattgaaaaaataataggggcctttctaaaattatatttcttttgtaaactttcttttaaccgctcatttactgcgtcgactaccagctgcttgtcaattccatttggaaatatagcaattttatcttgctctacgtgaaataaagtgattaattccttcttcatatagtcgctgcagacaatgattgagcttgattgtcgaatcagctcctcttcttgcaagtgaattttttgctgcatgtcattatgaataccattattgcgcccatgttctgtcgcatgaatggtcgtaattagcggtctatccgttttatctgctaaacattttgcagcggaggcaacaagccagtcatgagcatgaataacgtcaaaagacagcttgtagcctaactgcagtcctctaagagccatagccacgttcaaactgtttacccatgtcaaaaaatccggatgatgaggctgcaggcttttaactcggtaaacgtgaacaccgtataaacgctcatattccggcagcccctctacatacgttgttaatacactaacgtgatggcccgcctttgctaacgctctggataaatcaaatacatgtcgtgcaagtcctccgataactagaggagggaattcccatgcaagcattaaaatggagagaccgcctttatattgatttactgataaagccgccggctctatctcttttgcagggtataaaaaagaacttcctgaaagaaaactgttttcgctatccatccttggattctcttcgtgacaaagaaaatcaaatagttttacttgcctttcgtattcatctttgactttttcaaaattataaagccaatcgctgctacttaaaaggagccactgtcggtagatagcattcaccacgctaggatgtttagaatcgataacatctagcatcgcctctgacttctgtacggttgaaataaacaattgattgttctcactgacaaattcggcgctttttgttgcaccgtagagtgcaagagtttcgttttgatgaaactctatatccctcgcgtaatctaaaggatattgaaatataccgcttgctgcttgcattcgctgaaagccaagcgtgtccttagccttcaaatccaaaaaaacgctcgctttattgattgttccttcctcaacttggtttccttgcttaggatatggaaacaagataatgccagcaggcgacttttttagttcatctgttgatgacttcacaaaggtatagcgcatttcatgagattttaggagcatatctacttgatgggtatactctccttgctgtataaaaaaaccgacgggctttttttcaaaaaactgttgaaaaacacgtattgcttctgtagtttggagatttaatgtttgttcggttttaagggtggaaacgaacgcgttcgttacggtagtaggaatacactccatcatgtcatgctgaaaaaaatatttgcaggctgagaacaagctcccgttccacttttttaaaaaggtgagtgctctctgatgctgccggcttgaaaactggtgtaaatattgagcgtaacgagtattaaactcctcgtcgtttaatgtgttcaaaaacacacaagacatcacaactgttgcacctatcaatttcttagactcaatttgatctaaaaaagggatgaactcattcgttacttgttcaaacagcagatacttattctctgtttgaagtacatgtagcaacggacaatgcatataagttaaaagaatacagtcatcactattcatattgcttcttcacctgctccaagtcatttgaatataaggaatatgtgctaaattcattttgaacaccctggtgaacttttacaggttcgtacatccagcctaacgaagttacattcacttgttcatatttttctttcatcaaataaactggattcgaacgaagaagggaaaaaaaacttccttctttatcttgaataccaatatctattacatacgtgcgctcactttccaagctgttcataaacatgaagtcttgcttaggggtaagacccttcatataatagcggtttgattcatggccgttaaaatgaagacctgttatatcatacgtacacatagctaggttcaattcttcccaccgtgtcgaaaacatactttctaccatctctcgaatatgctcagaaaacgaccagtgaacataaatacgagatgagtcaagctgagtagctatacacacatttaagttttgaataaggttagcagccactgttttatcacttcgtttcttagaatgttttttctacatataaatgccgtataaacttattaacatcttaccattcagaaaaagttgccacaataaacgcaatttgtcgatttgtgttaaaaattcaggtaacatagtaattataatttactaacaaaaaaacctcttcgcttattagaagaggtttttctactattcgtttaagtcgtagcgtttgccttttacaaggtaaaatacgctttctgctacgttagtggtatgatcagccatacgctctaaatagcgggctacaaataaaagctgcgtaatttggttcatagcctcctgcttttctttagcaagacttaaaagttcttttattgttattccgtagagctcatccacttgatcgtccatttccgctacttttttagccagcacaagatcttcctcgtgataagcttttaacgaaaggctcaacatttcaatcgaaatatcgtgcattttctttacgtgttctaacggcttaattaattcttcgtttccaattcgtatagctgattttgctacgttaaccgcaaaatctgccatacgctcaacatccgaagcaattttaattgccacaatgatacgtcttaaatcgatagccaccggctgctgctttgcgatcagtaagatagctaggtcattaatttcttcttctaagtcatccacgtatgaatcgccgtcgataatttctagcgccagctcaacgttgcttgtttgcaacgcttcaattgattttgatagcgcctcatgcgttaagcgccctatttctaataatttttcacgtaatatctttaaatcaccatgaaacttttcgcgtacaaccactcatcccatctccttgtatgtcttaaccaaaacgacctgtaatataatcttctgtgcgtttatcagatggcattgagaagattttatctgtttctgcgtactctaccacttctccatttaagaaaaatgctgttttatctgaaatacgtgccgcttgctgcatattatgggtaacaataataatgctgaagtctttctttaattcttgtactaactcttctacttttaatgttgaaattggatcgagcgcagaagtaggctcatccattaaaataacgtcaggttcaattgccaagcatcgcgcaatacagatacgctgctgttgtccacctgacaacccatttgcattttgattcaaacgatctttaacttcgtcccaaatagctgctcctcgtaaacttttttcaacaatttcatctagttttttcttgttgcgaacaccatgaattcttggaccgtacgcaatattatcataaatagatttcgggaacggatttggcttttggaaaaccattcctacttgcgtgcgcagctcttccacgtggtacgatttatcaaaaatatttttccctctatactcaatctcacctgatgtacggacaattggagtcatttctaccatacgatttaacgttttaatatatgttgattttccgcagcctgatggaccgatgatcgcggtaacttcgttagcatgaatgtctaaatcaatattttttaaggcatgtgtgttgccataccataaatttaaaccttttgttttatatacaatttcttttgtttgcggagtatttactttttctttgttagtcaattccattgttattgccattggataatcctccttcatcgtctttaaccgttttgagcacattaaaagtctctctatgtctatttaatatctattgtttactatcactgtaaataaatacgagaagcagaaacgcttccccttattttgatcatttctattaacccttacacttacagaataatagccgactattaattgtgttttaactcaatgtaaagcttttgtaaacaaaggtctatctgcgtgtttttcaggtaaaaaactagttcttacgacccataaattcaataaaaaaccatatatgtaaagatttctaacaaaaagaagaggtagagacattactaaattaattcaatctaaaaatggatgtattggataaataatccagtatgaatcacttccgataccgctgttgattttcgttccacgggcggccggtgagtctcctcgtcgcttcgcttttcctgcagaagtcttcaccttgccctccaatcaaccgctaaaagcacctacatacacgaaatctactttcatcctataaataaaagatccgaacaaagttgattcttaatcaactttgttcggatcttacttcaactaatatgcttttgtcccagcctctttaattggcgtcgtttgcaatgacagcctgttggttctcttcttgatcttttacttcttgttcaccttttttctttaaatcaaaatacgtatcgagcgcagaacgagcaagctcttttgtaatggtatttggtgcacttggcacaaataccgatggtaccaccacagctactgcaatttcaggattatttgccggagcaaaggccacaaagtttgaattattaactttaatagggtcccctcccctaggatttttctcataggcttgtgccgttcctgatttaccagcaggattatagttcgctgtatggaaagctgcatatcctgtaccgccttgttcttgcgtaacgcgcttaaaaccactttgaacatctttaatgtattgttctttcatcgtaatacgatttaacacatcaggttcaaatgaatgctgcgtaccgccaatttcatcggttttaatcgttggttttcggatttcttttactagctgcggcttaatacgataccctccattagctattgcagaagtatattgaacaagctgcagcggcgtgtacgtatcatactgaccaattcctaaatcaagcgccgtacctggaacatcgcttccaccttggacacctgttgattcgttatcaaggtctatgcctgttgatacgcctaagccgaactgactgtagtaagaacgcagttcgctgaatgtatcaggtttaatcggtaaagtcatgtttttatgatactgtaacccagccatagccattaccgttttaaacataaatacgttggatgaatattttaacgcagatgaatacgttaagggtcctaacccttcggcctcagctgattttttaaccggtgttcctttaatttttaacggttcatcaacgaacactgtgtttggcttaatagctcctgaatctaagccggctaaaaccgttgctccttttacaacagagcccattgtataagatgttgaaatatttcctaatgcaaaatcttctattttaggcgctccagtcttcttatcaatggtgtattttttacctgccattgttaaaatttctcctgtgtgaggatccatcataataacaaaagcacggtctaaaaattgcgttcctttcatttgctttttggctaaaagctggtccgtaatttgcttttctaccgctttttgaagctccatatcaatagttaaaaccaaatcactgccgcgttcacctttagacacttgaattgtatcaaggagatttccttttttatctgttacatattggactttttctttttgaccgctgagctgagcttcgtattgcttctctaaatagctcgtcccaacttggtcatttcggctatagcctcttgacaagtaatactgtactttatctttaggcagtccttcgttggcagatgatacatttccaagcaaagtacgaagagtactgttttctgggtatgagcgatcccaatacgttgttgtatcaacacctggaagttcatctaagtgttcacttacaacggcatactcttcatttgtcacaccgctcttaacaatttgcggggtgttagagtaacctgcctccatttggcgcttaatagcgagaacttctaaatcactctttagactttctaaatcttttttagagatgcggtctaactgacgttgatacagttcgtcatcagtcatttcaccatcttgaacttttttgcgatcagcttgcgtaattttctgttccgcttctttagggtgaatcataatccaataatccttcatatcgcgttctgtaatttttaccacatttttagcatctttattctttttattttccggaatatcaatcacatttgtggtgtaaggaacatcgatcatagtggctaactttttagcgatgcgcagcctttcttcagctgtatttccttgaaaacgagtatatgtaatcgtatttaaagaggtattatctacaattacgcggttataacgatcgtacattttccctcgaggaacaggcgtactgaccgtaacgtcctgtgttttttccacttctcgttcgtaattctcaccgtatacaatttgaacaagtcccaaccgcaaaattaatacggaaaatagggcaaatacggtcaagaaaagtaagttcacacgaaaaggcacgtgactttttcttctttttttctttttcataccaacacctacactttataaaacatatataccataacaccataaaatcagccatttagcaaataaatagacacctggcaggtgcctatttacacaacgtatttattctaaaagaaaagcgaagcattttccatagtacaaatgaaggagctgacaacactctaagctggagactctccgtctccttcatttaataccggaggagtaacagtcgtttcttttttgtgcagaggctgtgagatatgtctcacacaaaaataaatgatcgtatgccctgctccaacaatagctaataaaatgggaatactttttgcttcatcaaaaaatagtacagctattaaaaataaagatatagaaacgacgcgcccgatattcagaaatacttctctgacaacaatgtattcaattctttttgaaacaacgtcttttgctcgtccaatcacatcgtacgttagagaaatgaatggaaccaataaaataggataggcaatggcaatacaaacagcatatataattaactttggatacgataagttaaagataagcaaaaagactgctccatagagaaggaggccccctgtgaagataaaccgaaggcgatttttttgcttaataaaccttgaggcaacatagtatcccacaaatgcaaccgctgaatttaccagtccatatgttcctaaagctaattcacttcccgtcgtaataaataccatgacggatacaacaaaaatgaacgtaccttcacgcaacccttgaaagaaatgagcctgcaatattcgattccagtctttattgacttttcgttcagcccatacctctttaaatttgtatactccttccgctgcgcgtcttgtaataaaaaaactaagcacaacggcaccgataaacaatagcagcgatacaccaaacacaattttatacccaagtgattcatacaaagcggaaataacaaagcccgctcctaaaggaccaatcatccctgcaaaagagtttaagatccctaaaaatccgttaaaaaagtctcttgtatccggttctgtaatttcaaaagttagcacattaaaagctagccaataaaagccgtatcctatacccagcagcccaccaagcaatactaaatactcggctgcgttagctccactgactaatacagcgatataaaaaacagctaaaaaagatacacctaaccttaaaaccacaacccggtcaattcgtttggcccatttacctgctaaaataaacgtaagcggctgaagcaccactaccgctaaattataaatagcgagatccgaaaattcgcctgattgtttccacagataaatgttaacaaacgaattggaaattgaaatagccaaggcataaagaccgcctataattaaaagcaaaagtaaatctttactaacttctacatctccaactactttttttaataaaggcatatcaaaaaactccttttctcttctacacctagtgtgtgaaaaagaaaaggagatatgtaaaagaattggaaaacaaaaaagccagtaaaggtaataattactttactggctcttaaatacgtctttagcttattttgcagcgtcgtaacgcttagcaacttcgtcccattttacaacattaaagaatgctgaaatgtaatctggacggcggttttggtaatttaagtagtaagcgtgctcccaaacgtctagaccaagaattggcgttttaccttccattaatgggctatcttggtttggtgtgcttgttacttctaaatcgccgttgtttacaactaaccaagcccagccagaaccgaagcgagttttagctgcatttgcaaattcttctttgaattgatcaaagctgccgaatttgctagcgatagcgtctgctaattcaccagttggagcaccgccgccgttagggcaaaggattgtccaaaataatgagtggttcgcatgaccgccaccgttattgcgtactgctgtacggatatcttcaggaacagcatctaagtttgaaattaactcttcaatacttttgctttctaaatcccctttgccttcaacagcagcgtttagatttgtaacatatgtgttgtgatgttttgtgtggtgaatattcattgtttctttgtcgatatgtggttccagtgcatcgtatgcataaggtagttctggtaatttgtaagccatgaataattcctccttcaaaatatgtaagcattttggcgcgaaagcaccatatacgtttagattagcaaatttaccctactgtttcaaataaaaagttcctaatccatgatttatatttacctaattcccattcgctattcttttaaacataaaaaaagcttctttttctcaaaagaagctttgaatagacgatagtatggcggaggaagagggattcgaacccccgcgggctttaacacccctgtcggttttcaagaccgatcccttcagccggacttgggtattcctccaaccttataaatggtggaccctgcaggactcgaacctgcgaccggacggttatgagccgtctgctctaaccagctgagctaagggtccacatggctccacaggtaggactcgaacctacgaccgatcggttaacagccgatagctctaccactgagctactgtggaacaatatgaattatgtaagtcacaaacgtaaattggaaaatagcggcggaggggatcgaacccccgacctcacgggtatgaaccgtacgctctagccagctgagctacaccgccatggctccacaggtaggactcgaacctacgaccgatcggttaacagccgatagctctaccactgagctactgtggaacaatataacatttactagcgacattaaaaatttaacatgtttctagtctaaagtcaatatattattttaaaacagcgtataaaaaataggcaatcatcagcagttgaataaatccttttgaaatagcaccactaaaaaagccaataaccgaacctactccaatttttactgcgttgctaattgtagtccgatgaacaatcagttctcctacaatcgctccgataaacggccctaaaataattccaaatcccggaatgacaaacggacctacaagcagcccaactgtacttccccaaacacctgctttagtgcctccgaattttttcacaccaataatattagctatatagtctgctaaaaaaagtgcgacaactaacaatccttgtaccacccaaaataaccagctataggagctaaaatcataaaataaaccgtatataacaaatcctagagctacaaatagcacgctcgggataatgggataaaccaacccaacaaacgatacaacaaagctaacgataattaatacccaacataaaatagccatgcccgcacctatcctttttattattactatttatcatacaataaccactcctataaagaaagaccttgcacgacgagtacttcctttatttcactttcgaatacctcttcaaataataattttcgagtgtacctctgcaatattaacagcacggtcctcaaggcgcccgtaatatcaaaaaaaacaatgacggcaaaacctgtacatatacgcataaaatgtgcttgtaacataacgctccaccgcatcattgtaattggtaacggtttctaaaatctattgtaaaccttaaattttcgctataaaataaggtataataagaatcttcaataagaggaggctttacaatgagcatgctgaaaaagatggcatggagttttatttccttcaaaaaaataaggtcgcttcgctttgagcatacgaataaaacaattggttttgtgctgtttctaacatttatttctttgctgcctacatttttctttatgactttgacgattgtaaacggctatcatatcgctactacagatcttccgaaatctgtttcttctttttctatttcaaactcacagcttacgtcaagtcaacctttcacaaaaaaagtaaacggtaccgcttttatcttaaacccctcacagtctattgaacgatttcattcccctgctcatgccattggttttttaaaggatggaatttacatcacgactaattcacaaacacaaacgtattcatatgagttgctaaactggcatcataaagataaaaatgaactgttaaacttgctgcacgaacaaaaattttctttatacatacttgtccctatcgctatgcttttactgtacgtattaacatctggactaaacttcctttctattacctgccttgcttatcttggaaagctgattgcactcattgctaaaaagcagcttcctttcaagcagctatgggcactgagcgcttatagtacggtagccttcacactgctttatacgctttttgaagctttttctttgtctctagcactacatagctctctttactggataggaacattcttcatttacttgttgctcgtcacaagggttcctataagaagaaaggtaaaacctaataaagatgctgggacaaacgtattttagttgaaggagaatccaaacgaggaatctagattcttgatagagaatccacctcttttggatttttttattgatatggtgaacgcaggtttcatgtatgcggctgcttctagctggtgattggagtgatttagttaagtctcagcctctttatttcggtacaactttttttcttcccattgcacaaggaagaattttcaactgatacaaaacccacaaacctcctgctgtgagcagaataaagctgtaaacaaacatcagcctttcagcatgcatccacacttcaaaaacaacaggtcccaacgctactcctaaaaatctcaccgttccataaatggatacaataaaccctctttcttcgtctgaagccgctgaagtaatcatcatattaatacacggaagaacaaatcctaagccgccaaaggcgactgtcaaacaaaacatcagaacaggaagcgtataaataatcgttaatactccaaacatcaggaataaaagagttatccctactatcattaattttttcatgagctctacatctgttttgatgcgttgaccggtccaataagaaacgagcgtcatcgcaccaagaggaaataaaaaagcggttcctttaaaaaaaccgtctatatgatacgtttcctctattagaaaagataaataatataaaataccaaataataaaaacaaccccaatcccccgacaaagaataaaggaaaaagcgattttcttttattatagacaatcccattggctctctttaaatattcttgaacagatactgaatccgaacctgttttcccttctctcacatacagcactatacctactaaagcagcacctgcagctaaaggatagacaaaaaacgcggcataccatacgacgagtgctaccgatgctccaattatcggcgcaaccacttttccaactccgttatacacttctaaaatcccgaggacttttgctcttttttcccctgtaaatacatctccagttaatgccattgccaacgttgtagtacctgcagctccaatcccttgaatgactctgcctgccatcaacacagcaaagcttccagaagagaatgaagcactactagcagcgatgacactacctattatcatcatgacgagtgaatatatgattaactttttacgcccataccggtctgataaaatccctacggcagggatacacaatgcagctggaatcgaaaatgcactcagtatcaaactggtttgaactccgcttaagtgaagtgacttttgaatgcttggcagcagaggaatgagcatggaatttcccagcaccatgattaaaggcaataagcctaatgaaacaatcattaatttttctttcaattttcgttctccaatcatatttaagtaagacaagcataggctttacacataagcaaaagaatgaaggaggagcataatgaaaaagctatgtgcattagccgctttcgcttttatcggatatatttgtcactacgacattaaatacgggaccattcccactgctactgaagcagttcaagtcagcaaagcgcagcctgcagaaacaaaagccgccagctcttcttccacctatacaaaaataaaaattaagccaggcgatacagttttgtccatcattgaggagcttacaaaaaaatcgataccggtttctatgaaccaaatgattacagacttcaaaaagttaaataacggtacagcgcctgaggatattcaaattggaaaaacgtataagttccctatttacaagtaatgacagcattcttcttgtcaagatgggatagtcattgttaaaatagctaaggtagcactttctactagttattttgttcataaagagttattctattaatgaattcaaattcttgatttcattttgaaggagagattatcacgtgagtgaaattatacatcgtacaaaaacacgccccgttaaagttggagatttaacaatcggaggcagcaacgagttagttattcaaagtatgacaaccactaagacacatgatgttgaagcaacggttgcagaaattaaacgtttagaagaagcaggatgccaagttgttcgtgttgcttgtccagacgagcgcgcagcagatgcaatccctgaaattaaaaaacgcattaacattccattagttgtggatattcattttgactaccgcttagcattaaaagcaattgaaggcggagcggataaaatccgtatcaaccctggtaatatcggtcgccgtgaaaaagtggaagctgttgtaaatgctgcaaaagctaaaaatattccaattcgtattggagttaacgctggttcacttgaaaaacgtattttagataaatacggctatccgacagcagatggcatggtagaaagtgcacttcatcacattaaaattttagaagaccttgatttccatgacatcatcgtttcaatgaaagcatcggatgttaacttggcaattgaagcttatgaaaaagctgctcaagcatttgactaccctcttcacttaggaattacagaatcgggtacattatttgcaggaactgtaaaaagtgcagcagggcttggcgctattttatctaaaggaatcggaaatacattacgtatttctttaagtgcggatcctgtagaagaagtaaaagttgcgcgcgaattactaaaatcatttggtttagcttccaatgccgcaacgcttatttcttgcccaacttgcggacgtattgaaattgatttaattagcattgctaatgaagttgaagagtatatttcaactgtaaaagcaccgattaaagtagcggtacttggctgcgctgtaaacggtcctggtgaagctcgtgaagctgatatcgggattgcgggagcacgcggtgaaggtctactattccgcaaaggcgaaatcgtacgcaaagttcctgaagaaacaatggttgaggaactaaaaaaagaaattgataaaattgctgctgaatatcacgcaaagcaagaagctgaaaaagctgcagctaaatcataactaaaaaaagcgaggcgcatatgcgcctcgcttttttttatgaaaagaacggtaatataaacgtaccgacaataatcgatacaactccgatccctattgcccatgctcctagcgtaagtgctccttttctgcgtgcgataaaccctagaataatcccagcggcaccaagaataattggtaaaaagaatagtgaaagaatcgaaagcacgagtgcgaaacgaccgtatcccgttccttctcctcgcccagcgacttcatgattgcgattgcgatcaatatctataacttcacgctctgcatgaggctctcctactcggtaaggaacgcccacttcagctgcagtttcttccatgaaatcagcttcatatacatcttttctacgcctttgttcttcattctccatgcttaatccctcgctttcgtaaataaggagcatttatagtatctgaatgcgagaaaaaattataagtgtcaatcttatacagccgctcactctcttacaagaaataggtacagacgcaatatcaccaggctatgcagtgatcattacgctttgccaaaggcgtataaaaagtattactgtttctctttgggctttatgttacactagacaagaatagtcaagcacctaagtagaataaacgtattaaaggagtgcacgtagttgacgaaaaagtttggaattgacattgatggaactgttacttctcctgaaacttttgttcctcatttaaataaagcctttaacttaaatttaacacttgaagacattacagaatatgatttcagcccttttgtaaatgtatcacctgcagaactcgggaaatggtttaaagcaaatgaacgctctatttacgaaacctctccacttgcagacgatgcaaaagctgttttgcaaaaatggcatcaaaagcacgaattattctttattagtgcaaggcatgataagctattggacgtcacggaagaatggtttcaaaaaaatgaactatcgtttcatcacattgagttagtcggttctcattttaaagttgaaacagcaaaacgatatgatgttgatatcttttttgaagacaaacatgataatgcttgtgaaatcagtgaagaatgcaatatccccgttatcttatttgatactccttataatcgcttacctgttccaaaaggagtggttcgcgtatacaattggctagaagcagatcagtgggtagccagctggttaaaagaacagcaaaaataaaaaagagaggtgcataacgccctctcttttttattgattacattctatacattgaccgtaaatttcaaatttatggcctgtaatattgtatcctcgcaaatcctcgtctacatgctccatcggacaagcttcaatttcttttgtttttccacaatctaaacaaatgaagtggtgatgatgatgggcggttgcacatttaaatcgaaagtgcttttcgctcgaaagctccgtcatttcaagtacgcctaactccacaaacaatgataaattacggtaaattgtatcaaaactcagaccgggataatcaggcttcatatattccaatacatcttttgccgttaagtacttatttgattttgaaaacaaggcaagcatttcttcacgctttcctgtatgtttatatccttgatcttttaataaatgaatggcttcagttaaattcatttttgtttccccttccgtcctttattaatcataatagatatgattaaaataacaacagcaatgacaacaattgtaccgcctggtgctaaatccaagtagtacgctgaaaataatccgcctaaaacagatatttcaccaaaaatcaccgaaagcagaatcgtttgtttaaagcccctagctaagcgaatgcttgctgctacaggaagagtcataagagatgacactaataaaataccgacgatacgcatcgatacagcaatgacaagagcaaccatcacaataaataaaaagtgcatccacttcgatttaatcccagaagcagaagcgtgctcttcgtcaaaagataaaataaacaattctttatataggaaaaagacaatagctataacaaatacggctatgacaacaactgtccaaagatccgaacgactcaccgcacttacgcttccaaacaaatagttcattaaatcattattaaaaccgtccgctagcgagatacaaattgcactaataccaattccgcccgataaaataatcggaatggccagctcttgataatgcttgtagacgcttcgaagtttttcaataaaaagagcgcctgtaacggaagataccatccctaaatagacggggttcactccttgcataaaccctattttctgactaagaagcaagctcgcagaaatccccgctagcgtcacgtgacttaacgcgtctgcaattaaagaaagacgtcttactacgatgaacgtgcccaataaaggagctaagacgccaataatcataccggttaaaaatgcatttcgtaaaaactcaaattgaaataaactgcttatcatacgtgctgccctccatgatgatgatcatgggtcaacacatgaacattatgaccataaaacatagatacgtcatgttcacaaagctgttcgaattctttggcattcccatgaaagtgtagaaatttatttaaacaagcaacgtgggttactttttctgagacagtgccaatatcgtgagtaacaagcacaagcgtaattcctttttctttatttaacttttcaagaagctcataaaaagtgtacacattttgtgcatccactccgactgttggctcatctaaaattaacagctcgggttcgctgacaagcgcgcgcgcaataaaaattcgctgctgctggccaccggatagttctcctatgtttcgatttaaaaattcgctcatccccactgcttctaccgcttctttcactttttgtttatgagaagcattcataaagcgaaacaaacctaattttgaagtaagacccgtggaaaccacttcaaaaacggtagcaggaaagccgctgttgaaactattcgctttttgcgatacatatccaattttacttcgttctttaaaccttctctgatcttttccaaataaacgaattgcaccttgagatggtttttgcaaaccaagcaaacatttgattagcgttgatttcccagatccatttggcccaacgagacccaaaaaagctccttttggaattgaaaaacttatatcttctaatacattcactccatcatattgaaatgataaatgatcgatttcaatgatatcaggtgtattcatatgcgcctcaccattctttttttatatttctccatacaaaagagggcacggtttctatcgtatactccgttacccatttactttctcagaatcattacgatttagtcattaatgtagtatacaggattgtcttttatttgtaaactaagccgtttcactccttcgctttcttgcctccgtaagttcatccggctcgaaatgttgttttattacacaatatagtcacatctttcttttttattcataaactgtatatgacgaggaggtaatcatatgaaaattgtacagcagattgtcaataagaaagtaaacaacattaccccgaaagagcttttaaagtatagcaaacaatacaacatccccattacagatcagcaggcacacacacttgtatccgtcattagacagcagcccgtaaatatttataaccttgaagagcgccgaaatttaatcaaacaaattgctcaagtaacagatcgtgaaactgccagacgagtgaacgaattatttcagcagttaatgtaaaagaagaggtcatgtctatagacatgacctctttcaatcacatatgaaattacataagcttttgttttagctctgaatcaaagctttgtgcacgaatcatatcaatttccaactgatatggcgcttttttatttttcttatcttctcctacataaggagtttctagaattttaggaacttctttaaacgctgggtgatgaacaatataattcagtgcaccaaatccgatttcaccaaatccaatgttttcatggcggtcttttcgagcaccgcgtacatttttactatcattgatgtgaagcactttaattcgctgtattcctacggttttgtcaaattcatttaatacaccgtcaaagtcttgaacgatatcataaccagcgtcatgaacgtgacatgtgtcaaaacaaacagagagcttttcattgtgcgtcacgccatcaataatctgggcaatttcttcaaagcttcttccacactctgttccttttccagccattgtctcaagcgcaatttgaacttcttgatcagctgtcaacacttcgtttagacctttgataatttgctgaataccggcatctgctccagcgccgacatgagctcctgggtgaagaacaatttgctttgcgccaagagcatgggtgcgctgaatttcagacgttaagaaatctactccaagctcaaatgtttcgggctttgttgtatttcctagattaatgatatagggagcatgtacaacaatatctgtcattccatactctttcatatgcaaaagaccagcttcaatattaagctcttcaatctttttgcgacgagtattttgtggagcgcctgtatagatcataaacgtatttgctccgtaagaagctgcctcttcacttgctcctaaaagcatctttttgccgctcattgatacatgagaaccaattttcaacattcctttttacacctctaacctattgcgattaacgattgttgcgtctttcactacgctttttcttttgcacatactttgtaatttcacgagcacgttttttcttgtagccaggctttactttcttcggcttttgaataaagcgatgtgcctcttctcccacttcatccgctttcttcacacgctttttacggcggttacggtcatcgatggaaacccattcttgcttttgaagatctttgtttacaaactcgattcccattttctctagcttatttactgcatcttcatcttccacatcgaagattgtagcagcaattccagaatgaccggcacgagctgtacgtcctacgcggtgaatgtagaaatctagatctgaaggaagctcaaagttaatgacgtgtgaaattccttcaatatcaataccgcgagctgctaaatctgtcgctactacgtattgaaattctaaattattaatttgcttcatcattttcttacggtcacgaggagataagtctccgtgaattcttcctacttttaatcctttagacagtaggtcatctgctacttcgtccgccattttctttgtatttgtaaagacgatagctaaataaggattataagaaataagcatatcatgcagtagcttaaacttgttacgatgacgcagtggaactaatacatgctctaatttagctgctgctgcttgcttcggcgaaacatgcgtaaattttggattttccatgtatttttttaagaatggctttaatttttcaggaatagttgctgaaaaaacaagcatctgtaatttttcaggcatattgcttgccaaacggtccacatcttctaaaaatcccatatcaagcattaaatcagcttcgtctactactaacgcctttgttgtatacacaactaacgctttttcatttactaaatcaaacaaacgagccggtgttcctacaacaacttgaggctgcttctttaatttatcgattgtacgctgcttatctgtaccgccgataaaacattttgctgaaatttcttctccttcagcactgtgttttgttagctttaatacttcttgataaatttgagaagcaagctcacgagttggagcggtgattacaacttgtacttcttcttttttagggtctaccttttcaagtaaaggtaataaataagcgtgtgttttgccggtccctgtttgcgactgaccaattacactttccccttttaaaacggaaggaattaagcgctcctgaatctctgtaggctgataaaaacctaattgtttaattgcttctattaaaaatggttgaaactcaaaacgttcaaagtttgttttttccataatagtctccttttttacattcacgttcatcttttaaggcacaatatatgattataatcgatttttccttctgtgactacttctcattcatattactaaaacttattacctgtttcaaaaacattttatcgcgagttgcatacgatagtaaaagaaaatctactttactaaaggaggtgcgtcctttgctacagcgaagaccaccatttccacccggtatgcaaagaagaatgatgccaggaatgccaccacaaaacggctttgggcaacaccctggtaactttagccaatttaatccattacagcagtttcgtaactttgcccagcaaacaaatgctcaacaatcattttacccgaatcagcaaggcctgaaccgtggaggaggtaacttcttaactcgcctattccgaagaggcggaaatagaaacataccatttcaacaagcggctgcagctgctcctcgaggttctttgttttctggcctttcaggagcccaaggtgctgcaggagcgactaactcttcttccctgcttggaggtttgcaaggattaacgaaccctgctaacttgagctccatgatgggaaatgttcagcgagtactaaaagcagcggaaacgatgggacctatgattcaacaatacggacctcttgtcaaaaatgctccttctctgtggaaaatctatcaggccttgcgctcaagtgataacacagatgaagtactcgaagcagaaggaacagaggtttctgaaactgatgaaagtaaagatagtaaggttttatcagcaggcgcagaaagcacggattcatccgatgatgagctggatttctttgaagaagaaattgaacattcatccagagatcgggtgtctaaaccaaaactttatatttgataaatctgctgattccttaaggaaatacagtgagcaaaaaaagaatatctttgtattcttccttcctcttttatataatagaagcgagttgaattgctcgtcaggattatgatgaggaggaaagtgaaatgaaagttattaaaattgcaccgcgcggctattgttatggtgtagtagacgcaatggtcattgcacgaaacgccgctttagataaatcattgcctcgaccaatctatatcttaggaatgattgttcataataaacacgttacagatgcgtttgaagaggacggcattatcacactggacggtgctaatcgcctggaaatcttagaccaaataaatgaaggaaccgttatttttactgcgcacggagtatctccagaagtaaaagaacgagcaaaagaaaaaggcttaacaacaatcgatgctacatgtccggatgttacaaaaacccatgaccttattcgccaaaaagaaaaagaaggttatgacgttatttatatcggaaaacgaaatcatcctgagccagaaggtgcacttggtatcgcgccagatatcgttcatttaattgaaaaagcagaagacgtagcccatttaaatattcaacgtgagaaaatcattgtaacaaatcagacaacaatgagtcagtgggacgttgcagaagtaatggaaaaggtaaaagaaaaatatccgcacgctgaagttcacaaggaaatttgtttagctacacaagttcgccaagaagctgtagccgagcaagcaggtgaagcagatgttacaattgttgtaggagatcctaaaagtaacaattcaaaccgtttagctcaagtatcaatggagattgccggcactgaggcatatcgtatcggtgacatctcagagctgcaggttgaatggttgatgaatgcgaaaacggtagctgttacggcaggcgcatctacccctactccaattacaaaagaggtcatcaattttctagatcagttcgatccagaagatgaaacaacgtggacacgtgaaaaaagcgtgcctctttcaaagattttaccaaaagttcgaacaaaaaaatcgtcttaatagacacaaaagaaggtgttgacatttgtcaacaccttctttctttgttacataaacgtaaatgggtttgtgtctacttttgaatcaaatacttcacactcaaagtttttcgcatcaaaaagactgtttaatgcacgcgttacaccttgtctcatgactttttcaacatgatgaccaggatctacaacgtttaatcccattgccattgcatcatgcgccacgtggaaatacaaatcccctgttacataggcatctgctccgctaaattttgcgtttgtaatatatttgtttccatctccgccaagaacagctacttttttcaccgcggcatccatagaccctactactctaacaccatccacgtccaatgcttgtttaacatgagcggcaaactgttttagcgtcatctcttcttttaacttaccaattcgtccaagtccaagcgtctcgcccgtttgttccactggataaatgtcataggctacttcttcgtaaggatgagcactgagcatggcacgaataattttattttgctgacccgcttcaaaaatagtttcaacttttgtttcatttacacgttctaactctcctttcaagccaatgtatggattggcttctgaagaaggtttaaacgtgccttccccttcagttgaaaacgtacagtcgctgtaaagacccacatgtccagctcccgcatcacaaatagctgtgcgcactgcttcagcatgatttgaaggaacaaatacagcaagctttttcagctgaatagacgttgttggaaccagcacttttgtctcttgtagccccaatgcttcggccaacaagtcatttactccgcctttagctatatctaagtttgtatgagcagcatatacagcaatatcatgtttgatgcatttctctaaaatacgcccttcaggacgatctgtaaccacttgttttagaggtctaaaaataggaggatgatgagcaataatcaaatccacttgtttttcaatcgcttcgtctacgaccgtttcaagaacatctaacgttaccattactttttttacaggcttgtttaacgttccaatctgtaaaccaattttatctccttcaaccgctaaatgcttgggagaaaatgattcaaatgcttcaattacttgaaatccgttagggattttactcattttaacgcctcctcaattaatgagatgtcttgggtaagtttttgaagttttgctttactttcctcggactgagcctgctccatttggccgacaatttgtttaaggtgatttagttcatgcgtccactttgtcataaaagcaaaagagcgcttttcttttaaaatagggcccattaacacaccggcttccacttcaccgttataaggagctaaggcgtttccaggttcagcgacgatgacttcatacatacgaccgtcttcttcgatgattttttcatcaatgatttcccagttgtgttcaatcagccagctgcgaatatgatgtgaaccaatattcggctgaagtacaagcctttttactccttctaactttgcttttccttcttctaaaatcatcgtaataagcgttccgcccattccgcagattgtaatacagtctacttcattcggtgatattacttctaggccgtttccttttcgaacgtcaataacgtccgttaagcttgttttttccacctgctgaatagcagattgaagaggcccttctgtaatttctcctgctacggcaccgctaatatatccatttaaataagcaaaacacggcaagtatgcatgatctgagccaatgtctgctatctttgctcccaaaggaatcgactttactacttcttcaagtcttgttgataagtttaattcattcattttgtcacctattctctatgtgattactgttcattattttaacatagatagatgcatgattcctatttctcttcatgttttccttctagctgaatgcttataaaaaatcacaaaaaaaaaaagcctgctttataaatgagcggctttccagaaaatcatgtttctgaactctatttaatttctgatacccatttagccatttccttcgctttttccggaggaaccagcccaggcggcatgtttcctttaccgtttacaacaatatgtgcaatttcgtcttgagaaacttttttcccaattccttttaacgagggacctactccaccttgatactgatcaccgtgacaaccaatacaagttttttgataaatttcttctggtttagctgaagcctgctgttccgcgccaccgccttctttttcagccgcgatttcttttgcattattcaatccgttgaacgaaagcgttaacattaaagcaatcccaattaccgcaattaataaaaatggtattagcggatttcgcttcactcactataccccctttatgtattcccatccctagaaataacaaaatagtataagcacttttattttacttgaaaatgctcataagtgaaagggttttatttacataattaactaatttcttattgcgtatcttaacagccaatttgccttgcaataaccgagcgctgaatttctgaagttccttctccaatttctaaaagcttggcatctcgtaaataccgctccacgtgatactctttcatgtagccatatcctccatgaatttgaacagcttgactggctacttccatacaaatttcagaagcatacagtttacacatagcagcttctttcgtaaatggctttccttggtcttttaaccacgctgctttatacaccatatttcttgctaactcaattttcatcgccatatcagctaatttaaactgaatcgcttgaaacgatgaaatagcttttccaaattgctttctttcctgcgcatatgacagtgctttttcataagccgcttgagcgattccaacggccattgcgccaattccaattcttcccccgtcaagcgtcattagaaattgtttaaagccttctcctcttacaccgagtaaattctcttcaggcacttcaacatcctctaaaacgagttcagttgtatttgaagcatgtaggcccattttctcgtaattgtctattacagtaaaacctcgagcttctgtaggcacgataatagctgaaatttcttttttaccttctgtacgatttgtaacagctgttaaagctaaaaactttgcatagctggcattcgtaatatagcatttacttccattaatcctaaatgttccatccttcaacactgcttctgtctctgttccacccgcgtcacttcctgcgttcggttcggttaaaccaaacgctccaaaagattccccagagcataaagcaggtaggtactgttctttttgctcctttgttccgaataaataaataggtgcgcccccgagcgatacatgagctgagtatgtaattcctgtagagccacaagctttacttaattcctctacgacgatagcaaaactaaccgtatctgctcctccgcctccatactcttcaggaaaaggaagacccattaccccaagctcacctaactttttaaaaacatcaagcggaaattgcttacttcgatcgcgctctaatgcattcggtgctacttccgcctctgaaaactctctcagcgtccgttgaatcatcttttgttcattggttaattcaaaattcatttttattccccctaaaaaaatgtatacgcttacattatttaattataattcatttttgtaaattttctcaacttttaaaacgttttaattttttcatgttataatagaaaagtatcaatcaaagcaagaataaaatgatagcgattccatttttcggatatttaaaaggaatttgaacagcttatgctctgtaacaaaagaatataaaggagcatttgcaaaacgaaggacaattcagtaaaatatatgcaagaagaaaagttggtaaaaaaatcaatatacttcttcaaaatgcgtttttatgaaatttattccacaaaaaaatagatagcccctttcctctaggaaagaagctatctcataagcgttatttacgcttttatctattctaagaaatcttttaaacgtttgcttcggctagggtgacgaagcttacgaagcgctttagcttcaatttgacgaatacgctcacgcgttacgccaaatacttttcctacttcttcaagcgtacgcgtacgtccatcgtccagaccaaagcggagtctaagaacattttcttcgcgatctgttaacgtatcaaggacgtcttctaactgctcttttaataattcatatgcagcatgttcagaaggtgatgttgcatcctggtcttcaatgaagtcacctaaatgcgaatcatcttcctcaccaattggtgtttcaagggaaaccggttcttgagcaatttttaagatttcacgaaccttttcaggtgttaagtccatatcttctgcaatttcttcaggagatggttcgcgacctaaatcttgtagaagctgacgttgaacacgaattagcttgttaatcgtttcaaccatatgaacgggaatacgaatcgttcttgcttggtcagcaattgcacgagtaatagcttgacgaatccaccatgtcgcatacgtactgaatttataacctttgcgataatcaaatttttctaccgctttaataagacccatgtttccttcttgaattaaatcaagaaacagcataccgcgcccgacatagcgtttagcgatacttacaacaagacgtaagtttgcttcagcaagacgacgtttcgcttcttcatcgccttcttcaatacgttttgctaaattgatttcttcctctgccgacaataggtcaacgcgtccgatttcttttaagtacatacgaactggatcattaattttcacaccaggaggtacacttaaatcatttaaatcaaactcttcttcttttgacagttcttgaatatcgggatcggcatcgtcatcatttgcttcagattcactcattacttcaacaccttgttctccaaggtattcataatattcatccatttgatcggattcaatttcgaagttcgccatacgctctgcaatttcttcgtatgtgagcacaccacgtttttttccgatttcggtcaattgatcttttacttgttcaattgttaaatctgaatcaagttgttttgattgagctgatttttcagccatcagatcccctccttccaaaattttaaggaaaaccttctaaaagtgggactaatacgcaatatcgtttattttaacgttttttttaactgtaaaatttccattgctattgtcgcagcttttaaataatctttttgacgctctgcttcttgcttttctgcttcttttttttctatcgctaccctttgtgggtaaatcaatatcgtttggatataatcatttaaagcttgctccgacaattcatcattgattgacatcatcgccaattctgaagctagactagacaacgaagactcgggcaaccgttcgataaatccgctcggattaggctcgtgtccttcctcgtaataagcatacaaatatagaacaagcgcacgatgttcctcaacattgaactgaccttgaagtcggtcttgaattctaaatgctacatccttatctttcaacatatgagcgatcaaaaaacgttctgcattttgataagccggtaataagcttctctttacgactggttgtctatttatattatttcgatttggagaatcattatcctttttctttttttcagttcgatacacttgatactgctgttctttaagcgcatctaatgaaatggaaaactcttgtgccaattggcgtaaataatgatctcgctctacagctttcgtaaggaggcttatttctttcaaaacgtcttcaatgtattgcatacgttcagattcattttgtagatttcgttttcggcggagatacctcatttgaaatgccataatggtcaagctgctattaataacatcattttgaaacttctctgccccgtattctttaatataatcatccgggtcataaccatccggcatcacagcaatcttaacggtacaacctacatttgttaagatagtagttgctttgtgcgctgcttcaattccggcagaatctgcatcatagcaaatgataacggactctacatttcggcgaataatcttggcttgttcttctgttaaggcagttcccattgttgcaattgcgttcgggcacccagctttaacagccgaaataacatctgcaaatccttcaaataaaataacctgctgatttttgcgtatatgttttttagcgcggtgaaagttgtagagtgtgcgacttttgttaaaaatagaagtttcgggactgtttaaatatttaggctgcccttttatctcttttagcaggcgacctgaaaatgcaattgttttgccttgcaagtcagcaataggaaacataattcgatcacgaaaacgatcaaagtacgtttcatcttggttgcgtttaatgattaaacctgcatgttccatctcttgcggattaaacccacgttttgttaagaacttacttacaaattcccacgaatctaaagcaaaacctatctcaaattcatcgataatttctcgtgaaaaccctcgatttattaaataatcataagcatcttggccttcttttgtatttaccaataaatgatggtaaaatttctttaaaagctcgtgtgcttcaatcattttattgctaggcttttgattatcttcttcatgaggatgtatctcatgttcgaaaggaatatctcctttttcagcaagctgctgagctgcttctgtgaaggacagtccttctaattccattatgaatgaaaatgaattcccccctgcaccacatccaaagcaatgataaatttgtttatcaggcgatactgaaaaagacggtgtgctttccccatgaaacggacagagtccaaaataattgcgcccttgtttttttagttgtacataatcgcttatgacgtcgacaatatctactgaatgccgaatacggtcgattacttcatcaggaattcgatttgccatagtaacagctccgtatttcatataatattcttcactaagtgctaaattcctgcaagtttcgacaacattttttcaaaagcttgaatgaaatgctggcgatcttcttcactaaatgcctttgggcctttagtatgacggcctgaccgtcgctcttttgcagaaacataacgaaagaaaagcaccgtattcatttcgtcgtcattatagtactttccacgaggagacagtgcgtaaacccctcgacttactaacatgcttgctaagccagtatcttgagttaccacaatatcctgcttgactgcgtgatttaaaatatataaatctgcggcttccttttctgcatccacatagacccattttcctggtgtaggatttgtttgcatgtgagcataggaagcaacaaacacaagatcgatgtcatatgtatgtgtaagttcaacgatttctgctttaacagggcatgcatcagcatcgacaaaaactttactttttcttttgctataactctgtattctacatccctccagagattccttctaacaatttgttatttcctgtagatggcatttgtcgaatacttttttcgattttgacttgacttttatataaatagtttattcgttcttaacaaagtctaaacctaaaactattcttttttatcacaattttttattataatataaacaacctatattttctatactaaagtcacttgtttttaaaagttctgtcatattcatctttgggatattttcttaggcttacagcatacaaacataagaaagcaatctcctttatgtcacgcacagaggagatctatcgtttatttctttttgatggtattaagaatgataccagctgtttcttctacggctctgttagatacgtccaccacttcacagccaatcttatctacaatcccttggaaaaattcaagttcttctttaatacgaccaatattagcataaattgctttatcgtttagcccaagagactttaaacgttctttacgaatatcgtttaacttttcaggactaatagtaagtcctatacatttctcaggtgatacgtgaaacagctcttctggtggatctacctcaggtacaatcggaacattggctactttcaaacgcttgtgtgctaaaaattgagaaagaggtgttttagatgttcttgatacaccgattaatacaatatccgctctaagaatgcctctcgggtcacgaccatcatcatatttcactgcaaattcaattgcttctactttcttaaaataatcttcgtctaattttctagccattccaggctcatagcgaggagaaagttgataagaagattgaattttatcaattaaaggtccaataatatcaaatacctctaccccgttcttggacgcttcttgaattaaaaattctctcatttcgggctttactagcgtaaagccaataatagcattgttcatcttcgctactgaaaccacttctgaaagtgttgcgatgtcctctacgtaaggcactcttttaattacaaagtccgtcatattgaactgacttgatgcagcctttacaactagttcagctgtctcacctacagaatccgaaatgacataaagacatgggttgttcatattttgtgcatcccctttttaatcctttttcacttataatacttcatcatttgctaatgctactagtaattttgtaatatttgttttggtaatgcgtcccaccacttcaaaattgccgtctccctctttaataacgggcatagcatcaatctgtttttcaattaagatcttagcaatatcaattaacaaatcttcgcgatagcaatatgtaatgttgggcattctcgtcataataatatgaacaggaatagatgtgagctcttgctttccgatactcgcgcgcaataaatctttacgcgacagtactcccactagctgggatttctcatccactacaaaaagggtccccacgtcttctagaaacattgtacaaatagcatcatatactgacacattttcgttcacaaccaccgggatagactgatattcttgcacctgtattttttttattttatctgtaagaagctgtgctcctgttttacctgtgtaaaagtaacctacgcgcggtcgcgcttctaaataaccagccattgttaaaatagccaagtccggtcttagtgttgcccgcgtaaggctaagctgatctgcaatatgctcgcctgtaatagggccttcgtctttgacaatttgcaaaatttgttcttgtcgtttgttcagttcgattgtactcaccacctaatcattaaatgtgacatactatttataaaacattatatactttttaagcaaaagtaaaagctataactgattaattttagcattttatctttttagaatgccgtttattttaccacggcttctcaaaaaaagcaggcattacgcttacaataagcgaagctaccccttcgctccacagtaaaaagggtgtcccctacacactacgaggcaccctagcgacagcaattccttgcatatcactgattatcttttctatttctcatcagacagcgattgttttaaagactccatctgattcaaaaaccgctttgtttttaaaaacaatcctgaatattcttcgtaatattgatcaattacgaactttaattgtttttttgtttcgggcttaacagaaatagaacctaatcgctttaaatcaatgtaataaaatagccttaatagtttaaccgtcatcggactaattttcaaatgataaggatctttttctaagcaccgatgacaaataaacccgccttctcgaatggaaaaatgaaatgttccttcacctcgatggcagactgcacattcatttaatgtaggatgaagacctagaacgtttaacattttcatttcataaataaatgttaagatctctgcatcatactcttcgttcatataatgaatggtttggtgcagcagttcaaatagaaatggatttggtttattgttctcagtagctttatccgttaattcaagaatataagaagcatacgctgttgtgaagatatcttcgcgtatgcttctcatagatgagataacttctccttgatggagagtgcccattcctgaacctgcttgtataaaaaagtatccatacgtaaataattgtgtgacggaagctaagcgactactgggcttttttgcccctcttgccatgagacccacttttccgagttcacgtgaataaatggtgacaattttatttgattcaccgtaatcattcgttcgaatgacaattccttcacactttttaaacaatcatcatcaccgccatcttacagaaggctaagacaagggagaattgagactttcgctgttgtcctcatatgtttcgggtctttctttcacttcattttcaagttccttaaaaatgagataagtatcaatgctacctgtttgtgaaaaaatgttccaagtaaaattcaacatagaactcccacctttctaaccataaagatcagatacatatttcaattccttatgtttagaatagccttccgacgtaaaatcatgtaacacaattttttacaaattaccttcttttatgaagggatataaatcgacgcaaacaagaacacaaatgattaatattcgtcttctctaaatccaaagtcacggagatgcgacgctcgatttcgccaatctttttgaacttttacccatagttctaaaaatacttttgaacctaagagggcttcaatgtctgctcttgcttttcttcctacctcttttaacatctttccttgctttccaattacgatgcctttttgtgaatctctttcgacgataattgtagcgcccacgtaaacagcaccattatctcgtctttgcatagaatccatcacaacggcaatagaatgaggtatttcttccctcgttgcatgcagtactttttcacgaattaattccgtaataataaagcgctctgggtgatcagttacttgatctgccggataatattgcggaccttccggcaatcgctgcttaatttgatcaagcaaacgccccacgttatttccttgtaaagctgaaattggcacaatttcagcaaaaggatataagtctttataattcgtgataattgaaaacaattcgtctgggtgaatttcatcaattttattaatcacaaggaaaacaggcgtttttgtgtcctttaaacgctcgataataaattcatcgcctcgacctaagccttctgttgcgttaatcataaataaaattaaatctacttctttaagcgtattttgcgctaccttcatcataaagtcgcctaatttatgctttggtttatgaattcctggtgtatcaataaacacaatctgcgcctgatcttccgtgtacacaccctgaattttatttctagttgtttgcggtttgtcactcataatcgcaatcttttgaccaattactcggttcaaaaaagttgatttccctacgtttggtcttccaataattgaaacaaaacctgacttaaattcattattactcatgtaaatcctccgatgaaaatgctcctggaagtaattcttccacagttaattcttgtatgtcattttttaaattagttaatataactttcatttcttttggacaaagctcagagattacttgtctgcatgctccacacggagaaacaggacgatcagtatcagctactacagcaagtgctgcatactctttatctccttctgaataggctttaaataaagccgtacgctcagcacaattgcacatgctataagctgcattttcaatattgcagccgcgataaacctttccatctttcgtcaataaagctgcaccaactttaaattttgaataaggtacataagccatttcacgagcttttttcgcttcatcaatcagtccggtcttatccatttatccgctctcctttttgcgcttctacatgtcttttaacttgtccttttttattataccacgggggtgtaaagaaccaaaaagaatccttcttaaaacaaatactttaagaaaataattcctcctataaggacagcaaaacacgcatagaccaacaccgcggctgcggctgcatcttttgcgtgttttgctagtatgtgatattcaggagaaactagatcgacaactttttcaactgctgtattcattaactccaagctgaacatgcctgcaatcagaagcagcacaaccgtccattcaccagctgtaattgacagcacggcgcctaagagaaggacgatgaaagaagctgctacgtgaatttgcatatttctctgtgttttacaaacatagagaaacccttctattgcataaccaaagctactgacaactttagctatcccttttttatcgcgagagtccatattgttctaaaatatctttttgacgtgtaaacatctctttttcatcttctgatgtttcatggtcatatccaagcaagtgcaagaaaccgtgaaccgttaagaatcctagctccctcataaacgagtgattgtattcttctgcttgctcatgagcttttggaatcgaaatgacaatgtcccctaggactcttggcatctcatctccgataatttgcatttcatcttcgcccatttcttctagcgcaaacgatattacatccgttggctgatttttatggcggtattgatgattgatttcttgaattcgatcattatccacaaatgtaacggatacttctgcatcctcttgcagattttcatatatagcagcagcttcaagcagctgctcaagctctttttgctgttcttcacttacttcgtttgtttcatcaataaaatcaataactaaactcataccttcaccttctctttttttatctctggatattcgattcgggaatgaaaaatcccatttaaagtttcacatagtgcttggcgaattaactctagctctttaagcgttacgttacactcgctaagctgctcatcctgcaagcgatctttaataatatttcgcaccaagttctcaattttttccggagtcggattggacattgaccttacggctgcttctacactatcagctatgcaaataaccgctgcttctttcgactgaggctttggtccaggatagcgatattctttttcatcaattttttcttctgtttgttcaagtgccttatgataaaaaaacttgagcaaagtcgttccgtgatgctgctctgcaatatctacaatctcttttggaaacttgtgatttcgcaaaatggtagctccatctgtagcatgtgcgattataatatttttactagtcttaggacttagtttatcatgcggattagtaatattcatttgattttcaataaaatactgcggtcgcttcgttttaccaatatcgtggtaataagccccgactctcgctaataaaccgttagctcctatcgtttcgcacgccgcttcagataagtttgccaccattacgctgtgatggtatgttccgggtgtttcggttaagattttgcgtaatagcggatgattaggactcgataattcaatcagcttcatcgtagataaaatgccaaatccactttcaaaaaacggaagcaaacctatagttaaaacggaagcaataacaccagatgcaattgacatcatgctgtaatagccaagctctacagtgccgatttggccatttttaatgaaaataatagcaaagctgataattacgtttaccatagccacaaatagacctgcctgcaaaatccgtgaacgtctgtgctgcctgcttaaaaataaaatagcagcaatattgctaattaaaaagtagatcccaatgttcatattaaacgaggttgtcaattcaccattaaaaataatgcttccacaaatagcaaatacaacgcttgataaaatagcaatacgttcatccattaaaattcgaatcagcaaacctcccaccgcaacaggagctaagaaaccaatttctgataaatcaatttgctgaaacaagcttaagattttcatgaggccaatcgtaatggttgctaccaatacatacaacagcaagggctgatatgtcttggtgtgaaattcacgcaaatagtaaatgaggcccgctatcatcattacaatcagcaaagctaaccctgcaaaaggctgaatagagcctttattattcaacaatcccgcgagctggagctgacgatatatatcaggattaataagctgattttcttctacaataatctggccttgtttgattcggacaggctccactttttccacagctgcttgacggttttcagctgttttttgtggatcataaatcacatttggaatgatagcgaatttagcaattgcattcattgaatcctttagagaattgctgacattggtgtaaacaagctgactttctacttgatcttttttctcttctacatcgctaatcttcacttgatctttcatcacatgatgaacggccgtgactacagcatctttcgcaatcgataaatcactgttagaagactgaagcagctgcttaatggtatcttttggcaagtttttttgaatgtcttcaggaagcttgtcctctagcattttttgtttggtttttaatacggcatcgatactgtcatcttcatgatcttctttttcatattctgtattaacttccatcatcgcatcaaaaatagatgcaacaagatcgacttggttctgtgcgtattctgttttttgtgtatacacatcttcaacggcttgttctgcctctgcccgttttttctctgtgctttctttatcttcaatggtaacgggtgagtaaatggtttgcggggaaatagatagtaatctgagatctaattcctgcggctttacattgctatacatagacgcaaacatcattacacctaacaaggcatataacccaatttgaattaaccgtaatcgctcgatctgtgccattgtttgcttgattatccgaaacgttgacacaaacgtacccccttttacaaaaaatagaccctattaagaaagggtcttttggtcagcttgttcgtacgcttgaatgatgcgtcccacaagtggatggcgcacaacatctgactgttctagatgaacaaatgaaatacctttaacattggtcaggattttcgagacagccgctagaccagactgagctccttttggtaaatcaatttgtgaaatatctcctgtaatcaccattttagacccaaatcctagtcgtgttaaaaacatcttcatttgcgccatcgtggtgttttgcgcttcgtctaagataacaaacgcatcatctagtgtacgacctcgcatataagcaaggggtgctatttcaataactccgcgttcgattaggcgttgcgtatgttctgttcctaatacatcatgtaatgcatcgtacagaggccgcaagtacggatctactttttctttcaaatctcctggcaagaagccaagactttcacctgcttcaacagcaggacgtgttaaaataatacgctgtacgtgaccatttttaagagcattaacggccatgacaacggctaaatacgttttaccggtaccagcaggcccaattccaaataccaaatcatttttcttaatagacgaaatgtattgactttgtcctaatgtcttaacacgaatagtcttaccttttacatttttaccaatctcttcttcatatacatcttcaaaaaactcaagagaatttttcttagctaattgaatcgcatacacaacatctcgttcagatatggaaatattttttcggataatgttcagtaactttttaagcatttcttccactagctgaacattttctgtacttccggagactacaacagtctcacctcttgaaatgatagagacctgcatttcttcttcaattcgctttaaattcgaatcttgtacgccaaataatgaaatggcttcgtttgaatcatcaagttgtacgttaattgttactagctgttctgacattcatcaatctccttgaataattggttgagtgttcgcaatattttctataacttggtaatgtattgataatctaactttaccattgtcctgttcttggtgcaaaactttttcaccttttattttagcatcctcacctaaagttgatagtaatttttttcgaccgatttccaaagctttttccatcgcctcttgtttagaatagacgcgctgcgagttttgttcttctcgtacagcaactttctcatacgacagaggtaatttccatttaaaaaaatagagtggatgctccactttttctgtcacctttgaggcgtatttttctttgttaaaagcccaaagaggcattttaaaagcttgaaaatctaaatagtgcttcgtatatccattacccgttaatacctgaaaatcagtttttaaaggcacttccacctcagacttataccatgtttcaccgtagactttccctttagcagctactacctttttatttttttcgtttccaataataccggaaactaggacctcgccttcattgacaaaatcattaaccttgactaaaggttgtcctttttcgacaaacaaattcgtaataatggctttctttttagcaatcaaatgttggtaaggtgttttttgctgaggcttgggctcatttttttcaaccacttggaagtgataagaagtgccgcgcacttctactcccacccaggtaatattgttcatattatccgttaaatagcgctgaattttttcaggactttctaacagaaattgaaactctcctctttttacacctattttggcaagctgcttagtcatttgatgttctgtttgtggttctgcaccgctaatttccactttccacaccatgttggaaagcaaaccaagaataataaaaaaagaaagaaaacctaaagcaaatccactatttttgatcactcgttttgttaaaaaaggaaaacctctgcctcttataaaataaattttacaatctgcgttgcgaattagtatacgaattttctttacatctttcaataatatcgttgctgttgctagttgaccgtcaactttatggacattcgaaatcataatctgttgtctcacacaattatttaaaaaacgttcaattccttttccaacaattcgaatacgtacggtaccaataacaaagtttgtccatccattcttcatttttttcctccttgtgttattgttctaaataaagaacttgattgattttaccttctaaaaccagttcttctggcagtattactttaatgaccagtccttcacctcgaattaacatttgtccctgttttagtaacacgcgtatttcagtatcagaaaaggctaataaacctttatggttttcaatataaatgtgtatttgtccaactaacgtaatacggggaagatccattaatacatcagcgggtagttccattgtttttgtcatccatcttttcatttggtgtctccactttttgctcataaaaagaaccccctttcatctcatgtttatgagaaaggaggttaatgtatcacatctatttatcgtttatatttacgttgtttcgattttggaggccctagaatttcggaccataccactccttgaacagcttctttacgagaaatgggcttgaaaacgtttttctcacccgtgatttttggtttgtcaactgtgattttcttttgaatagacggttcatgatacgaacgattttttagctcttccaatttttcttgcaaaggatttgtttctgctgaaagaacagtttccggctccctacgagctgtttttggctcttctttgacaggtcgatatctaggtctttcccgccttgaaggattgtttacaggaggcataggagctcttttagaacgctgctgttcttcctctttcgactgagctataaaacgctgcacaacgttaaaaataatccctccaacgatgacaaaaatgaaagcattattaataattagtttaataagcgtttcaacgatattcattaggagaaaacctccttgttaagctgattcattatttctcatcgtcttctttagacatttttccaattgaatcacgcatatccgtatcagcagtcaagttttgaatattcatataatccatgacgccaatattgccagagcgcagtgcttctgccatcgctaacggtacttctgcttctgcctctactacttttgcacgcatttcctctacttttgcacgcatttcttgttcttgagcaacggccatagcacgacgttcttcggcttttgcttgtgcaatatttttatctgcttccgcttggtctgtttgaagaactgccccaatatttttcccaatatcgatgtcagcaatatcaatggataagatttcaaacgctgttcctgaatccagtccttttcctaacaccgtttgagaaatcatatcgggattttccaatacttttttgtgatctttttgcgaaccgattgtagaaacaatcccctcgccaacacgggcaataatcgtttcttctccggctccccctactagtcgatcaatgtttgcacgaacggtaattcgagcttttgctttgacttcgattccatccatagccacccctgcaataaaaggtgtttcaataacttttggattaacgctcatttgtacagcttctagcacatcacggcccgctaagtcgatagctgctccgcgctcaaatgttaactcaatatttgctcggtgcgctgcaatcaacgcatttaccacacggtcaacgttaccgcctgctaaatagtggctttctaattgattaatggtaatacctaaacctgctttacttgctttaattaacgggttcacaacgcgagatggtatcactcgacgaagtctcattccgaccagtgtgaaaatactaatacgaacgcctgctgctaatgctgaaatccatagcataatcggtacaaaagtgaaaaaaacagctaaagcaataattgctagaccaataactacaaaaaacaatacgctacctacttccattaattaaggtcctcctttttcaaaggctctgtaagcttccgcaccacaacccttgatccctctacttttataatatttactaacacatctttgtctaaatatccgccttcagtgactacatccacatactcttcatcgatgagcacggtacctgaaggacgaagcggtgtcgttgttttaccttgttttcctattaattcataacgattttgattcgacacgtagccagattcagtattaagtgaatcattaagcaccatttttttgaaaggtgtaagctttcttttaaaaaatttcatcatcacaaacgcacctcccagtgccaccactattgcaattacaagagaaattcccatttcgatattattatctgttgacataaaaaaacttaaaatgatagctccaagccctagcagtcctaaaacgccgcctggtactacaatctctaacagaagcagtataattcctgctataaataaaacgagggcttccattcctgctaatccagctaccatatggccatagaaaaataaaagaagtgaagctattccaatagagcccgcaataccaaatgaaggcgtaaacaattcaattacaattcctaaagcaccaatggataataaaatgggaacaacaagcggatgggtaagaaaacgagcaatttgttcacttacactcatttttgcatacgtcagtttagcatcttcatagccaagtacgctcaggagatcatctaaattttttacagttccttctgaataaccaacttgctcggcttgcttcggagtgagcgtcagcaattcgtttccttttaagttgagctcaggtattaccatctttgtgtttgccatcgcttctgcatatttagggtttcggttattttgttctgctgcgctcttcatagccgataaccaataagactgagctttttttcctgctgcatttccctgttggtcaatcacagctgccgatcccattgtagaaccgggtgtcatataaatttgatcggcgttaagtgcaatataggctccggctgataatgcttttttatcgacaaaagcagcggtaggaataggtgttgaggttaagcttttagctatttcagaagctgcatctacagctcctccaggagtatctatgtccaatataatcaaatctgcaccgtcattttccgcatcttcaatggatctgtttaaaaaagaaagcaatccattttctaccgttttattgacaggaataacgtgtacgcgcttcacgtcagcggtgctaatagtggggaataacccagtggctaaaataagaaagcacgcgaaagaaaataaggttttcaccgaatacacttccctccttccatagatagtatgagtatgtacctgtatatacgtataactttaacaatagtttcaaattttttaaaatttatctattttcttctttacactcgaaaaacaaaacataagttcgattattatccatataaaaaacaccttacacaaggtaaggtgttttttatgataagtgttgaaggacaagcttattaacaagagagccatccgctttgccttttactttcggcataagcgctcccataactttccccatatcagctttagaggaagactgcgtttcttcaatcgtcgttttaataatttcagataactcttcttcggttagctgtttaggagcgtaaacttctaaaaccgctaattcagaatgaattttatcaacaagatcttgacgacctgctttctcaaattcatggagggagtctttacgttgtttgaattcgcgagaaataaccgtcaactcgtctgcttcagttaggtcagtccctaacttaatggcttcgttttgaagagatgctttgaccatacgaatgaccccaagcttctctttctctttgtttttcatcgcttgtttcatatcactatttaaacgctcgagaagactcataaatccaccctcttattagaacttgcgttttctagcagcttcagatttcttcttacgctttacgctaggcttttcatagaattcgcgctttcttgcttcttgtaacgtaccagtttttgaaactgaacgtttgaagcgacgaagagcatcttcaagcgattcgtttttacgaacaactgttcttgacattctaattccctccctccgaacaaaaccactaacatcataatgaaatgacatgttagacatgtcttttgcaattataatataatgattccttaaggtcaaccgctttacataaagtaatgcagttattccccctttattttatgaactttcttgataaaacattactcactcagctgttttatacgtatgaaaaaagctgcgtaaacacgcagctttccaataagtgttatgagctcatttttacctgatcttgaagatgaacctcatctagcacgcgaacaaactcaccttcattgtacggatatccagcttttgtaattttaacttttacaagctttccaaccatttcttcagacgctttaaacacaacctttaagtagttatcggtatatcctacgtataaaccactttcagggtcttctttatatttttcttccggaattacttctagtacttctccttcaaacgttgaagcatattcttttgccaattgatttgaaagttcgattaaacgatgcacacgttgattttttacttcttcatcaatttggtcggtcatacgagccgctggcgtacctgtacgtttagaatacgggaatacatgaagctctgaaaaaccgtgctctttaataaagttatacgtctccataaactcttcttctgtttcacctgggaagccaacaataacatcggatgtaatcgctaatccaggaagagcttctttcagacggtttaagcgctcaccaaagaactccattgtatacttacgacgcatgcgcttcaataccgtatttgaacctgattgaagaggaatatgcaaatgacgtacaaccatttctgattgatctagtacctcaatcacttcgtccgtaatttgacttgcttcaattgacgaaatacgaatgcgttttaatccttttacttgagactctaaatcacgaagaagctgggcaagattgtaatctttcatgtcttctccgtatccgccagtgtgaatacctgttaacacgatttctttatagcccgcatccactagctgctgcgcttgtgctactacttctttaggatcacgagatcgcattaaaccgcgcgcccatggaataatacagaatgtacagaagttgttacagccttcttgaatctttaatgaagcacgcgtacggtctgtaaaagccggtacatctagctcttcatatacgcgtgttttcataatgtttcctacgccgttaatcggctgacgctcttttttaaattgttcaatataatcaagcatcttaacgcgatcttgtgtacctactacgatatcaacaccaggaatggccataatttcagctggcgaagtttgagcataacacccagttacacaaataaccgcatctggatttttccgcacagctctgcgaataacttgacggctttttttatctcctgtatttgttaccgtacatgtattaattacatatacatcggcagcttgttcatattcaacacgctcatagccttggcctttgaacaattgccaaattgcttctgtttcatagtgatttactttacaccctagcgtgtgaaaagcaactgttgacataatcgtcacctcattaactcagtttgataagatatagcagacagcgcatataaaggagctgtttctgctcgtaaaatccgcggaccaaatccgcttattgtaaatttattttcttctaatactcctacttcctgctcggtcaaaccaccctcggggcctacaaccacaagcacggaatggccgggttttaaagccgaaagaacagcgtgcagatgagatgtttctccttgctttgctctttcttcataggctacaactttatgagtatagtcaccgctaatttctactagttttttaaaagaaattggggcttctactgctggtacaatcgtacgatgagattgttctgcagcctctttagcaatcttgttccagcgatctacttttttttgactctttttatcatcccatttaacaactgaacgagccgcaataaaagggataaacttatacgccccaagttctgtccctttttggataataagctcgagcttatcccctttaggcagaccgttcacaattgtaacatggactggaagctctttttcttcgcttatccattctataatagatgctttcacttcgttagcggaaatattttcaatttcacacaaagcagcttgcccctgttcattacaggcaataaactgtgatccttcattcattctcatgacgcgtgagatatgatgggcatcatcctgtgtcactatgacactttgctcttgaaattgatcatttggcagaaaataacgttgcatcttgacaccttctcacttgttaagcttgtttttgcgcaataattgctacccagtcttccataagcgttacttcttgaataacaaagcccgctcccgttaacgcttttttgacatcttcttttttcgcactaataatacctgatgtaatgaacatgcctcctggctttaatacctttgcagcatcgtctacaaaacgaacgattacttcagctagaatattcgccacaacaatgtcaaccggtccttctataccttgcaataagttgttttgacctactgttacgacgttcccaacttgatttagttcaatattttcgcgagcagaacgtaccgctacttcatcaaggtctagagcttgtacattacttgctcctaacagagctgcgccaatgcttagcactcctgaacctgtacccacgtcaataacggtatctcctgctttcactgttctttccaatgcttgaagagacataaccgttgttggatgcgtacctgtcccaaaagccattccgggatcaagctcgataatcaattcatctgtgcttactttttcatagttttcccaagttggtacaatcgtaaaacgctctgaaattttcacgggatggtaatattttttccaagcagtggcccactcttcctcgttcacttcactgatcgtaactttgttagctcctaaatcaaagtcgtaaacaagcagtccattaatttcttttttgataccatccacagtttctgctaaaaaactgttaactggaagatatgctttaatcactacaccttcttctgggtagtcttctacgtttaaatcgtagatttcaccaaaagttgtatctctgtctttcactaaatcagcaggatcttcaatgactaccccgctagctcctgattcatgtaaaatatgagagatgggttcaattgcttcttgcgctgtatgaatacaaatttcagaccatttcattgctaccaacttcatcctttctgccttcagtaatataggattttaaatatgaacatgacagatgacaggttggcaaagtacctttaccaacctgtctctgtttactatgaaagacaattattctcctttaattgctcgttttacttttgcaaaaaaggaatcatgctgctcatcaacggcttcttgaccgctcagttcagcgaactcacgcaataattgtttttgtttttctgatatttttgttggagttacaactcgaacgtgaatatgctgatctccttgaccatatcctcgtacgtttgccacaccttttccttttaaacggaatttcgttcccgtttgtgtaccagcaggaatcttcaacttcaccttgccgtgtagagttggtacttctacttcatcacctagcgctgcctgagcaaacgtcaaaggcatttcgcagtagatatcgtctccatcacgttcaaagaattcatgagtgcgcacgtggaacactacgtataaatctcccggaggaccaccatttacccctggttctccttgagcacttacgcgcagctgttgaccatcatctacaccagctggaattttaacattaattttacgtcgttttgttactttaccgtcaccgtggcacgttgcacatttgtctttaatgatttttcccgtaccattacaatgatgacacgcacgtcgatttaccacgcggccaaacggcgtgttttgttcaacgtttaactgacctgaaccattacagtgcgaacatgtatcgacttttgttccaggttttgcacctgaaccgtgacatgtttcacacgtttcttcacgtggaatttcaattgttgtttcttttccgaaaacagcttcttcaaaagaaagtgtcatcgtgtattgtaaatcggcaccttgtctcggagcattagggtcacgtctgcgaccaccaccaccaaagatcgagctgaaaatatcttcaaagccgaagccgccaaagtctgagccgcctccaccaaagccgccaaagccttgatttggatcagtatgaccaaattgatcgtattgtgcttttttttggtcatcactcaatacttcatatgcttcttttacttctttaaatttgtcagcagcatcttccgctttgttaatatctggatgatattgtttagaaagcttgcggtatgctttttttatttcatcttttgtagcgctcttactgataccgagtacttcatagtaatctcgcttactcatcaatactcactcccgaatcgtttcacataaacgtaattgtatcattattaataattccatagcaacataaaagttactttctattgctcccgtgcacgcagagagccaagtgaaaaactttccctttcgcttttccacgttaaaaaagtcaaagccaagaaataagcttgactttgactttttaaaaagatgtgaatcgcaccatggcgtcattcacgttagtcgtcaagatgcattattttttgtcgtcgtttacttcttcaaactctgcatctacaacatcatcattttgagcgccttgttcacctgcttgctgagcttgttgagcttgctcatacaattttacagttaacgcttgaacgatttcttgaagttcatcttttttcgctttgatttcttcaaggtcattcttttcaatcgctgcttttaaagcatcttttgcttcgttagcttttgttacttcagcttcttctacttttccttcaagatcttttaatgttttttcagttgtaaacactaattgatctgcttcattgcgtagttccacttcttctttacgttgcttatcagcatctgcgttttcttccgcttcttttaccatacggtcgatttcatcatctgataaacctgttgaagatttaattgtaatagcttgctccttgtttgtacctaaatcttttgcacgaacgtttacgataccgtttttgtcaatatcgaatgatacttcgatttgaggtactccgcgtggtgcaggtggaatatcagttaactggaaacgacctagcgttttgttgtctgcagacattggacgctcaccttgaagaacatgaatatctacagccgtttggctatctgcagccgttgagaatacttgtgatttacttgttggaatcgtcgtattacgctcaattagctttgtaaatacgccacccattgtttcgatacctagtgataaaggggttacgtctagtaatacaacgtcttttacatcaccagttaatacgccaccttgaattgctgcaccaagtgcaactacttcatcaggatttacacctttatgaggatcttgaccagtttcttttttgattgcatcttgtaccgctgggatacgagttgaaccaccaactaagattactttatcaagttcgcttgcagaaagacctgcatcttttaaagcttgacgcacaggagccattgtacgctctacaagacctgctgataactcgtcaaatttagcacgtgataaagatacctctaagtgaagaggaccagcttctccagcagtgataaatggtaaagaaatttgtgtagatgttacacctgataaatcttttttcgctttttcagccgcatcttttaaacgttgaagcgccattttatctttgcttaaatcaacgccgttttcttttttgaattcagctactaaatagtcgatgattacttggtcaaagtcgtcaccaccaaggcggttgtcacctgcagttgcgcgaacttcaaatacgccgtcgccaagttctagaatagatacgtcaaacgtaccgccaccaagatcataaactaaaactgtttgatcttcatctgttttttctaatccgtatgcaagtgctgctgcagtaggctcgttaataatacgctctacttctaaaccagcaattttaccagcatcttttgttgcttgacgctcagcatcattaaagtaagcaggaactgtgataacagcttttgttacaggctcacctaaatactcttcagcataaccttttaaatgttgaagaatgatagctgacatttcttgaggggtgtattgcttgccttcagcttccaccttatggtctgtacccatatgacgtttaactgaaataattgtgttagggtttgtaatagcttgacgtttcgctacttccccaacttgacgctcaccgtttttgaatgccacaactgatggcgttgtacggtttccttctggatttggaattacttttggttcgccgccttctaatacagcgacacaagagttagttgtacctaaatcgataccaatgatcttactcattgacaatgacctccttcataatatgtagtgttattgattcactttaaccatcgcagggcggatgattttatcttttaatttgtaacctttttgaagctcttctactaccgtgttcggttcgtattcatcgtcttctacttgcatcactgcttgatgctcgtatggatcgaatgttttcccgactgattcaattgcttcaacaccttctttttgaagtgcctctactaattgacggtataccatttctacaccttgcagcacagatttagtttgttcgtccgctgtgttaacttgtaatgcacgttcgaagttatcaagtgctggtaaaatatccgaaactaatgattgagcacggtatttttgagcagcttctgcatcgagacgtgaacgacgacggaaattatcgaaatcagcttgtagacgtaagtagcgattctcttcttcttcaagctgttgctttaattgatcattttcttgttgaagagggtttacttcctcagacacttcagcttcagttgcttcagcagcgtctgtttgaacttcttcaaccacttcttcgttttgttcttctacttgcttttcgtttgacaattcattcacctcccttaaatgtttacacacattttcacattttaaacaacgttttttattttatcacagggaaaggatggaagtaatatattccacccgattcctttattctttatacaagtttgttaatacttgagacatatctgatgacagcagtgtaagcaaactaatcacacgcgcatattccatgcgggtcggtcccagtatagcaattgtgccaagctgttcgtgaccaaaggaataactagctgtaattaagctgcaccctaccatttcattcaatttattttcatgaccaattttcacatgtatgccagcctcatttgggcttaacagcttataaaactgctgttcatgttcaataatgttaaacagcccgcgaattttattaagatcatgaaattccggctgagcaaacatattcgttttgccgccaactactaatttgccattcatgttgagctttaatgcatcattgagtatatccatcgtctgctcatacccttgaatgtggctttttaagagcgtcgctacttctttgtacattttatcatgtaaatcagtaatgcgaacgccgatgagcttttcgtttaaaatgttaaccattttttcaatatcggaaggttgaatactgctcggcagtgtaatcgtccgactttcaacgtgtcctgtatcggtcacaataatggaaacagctgactgagccgttaaaggtaaaatctgcagctgttttaacttatggctgaccgcttttggtcctagcacaatagacgttaaactcgttaaatcagataaaatttgcgctgacttttgaacgagctgctccagttctacaatgcgttcagcgaataccgaacgcaccgtggaaacgtcgcttgctttcaagtgctgcggggacactagatgatcaacataataacgataacctttctcagacggaacgcgccctgaagaagtatgagttttttcaataaatccaagttcttctaggtctgacatctcattacgaatcgtagccgaactaaaattaaactcttctttcttagataatgttcgagagcctaccggctgcgcagatcgaatgaaatcatcaataatgacttgtaaaattaataactgtcgatcagtaagcacgcttcatcacctctgttagcactctaaaactctgagtgctaaatctaataataaattaccaaatcactatagcgatgtcaacgatttgatattagattatcccaataaaggcttgaaaaacttcattccccaaaaatcgaccattgtgtgttaaaaagactgagctattgtcttcacccagaagtcctttctctttgtattcttgaataggttctccaaatacatcttttaattctcgattgaattttttcttaaactcctcttttgagactcctttcgttttacgaaggcccaaaaacatttcttcttccattttttcagcctcggtcacgctcacttcattgagatatgcatttccgttttgctcgaccgaatcaatgtacttttttaatggtccaatatttgctcgtcttattccgtctatatagctatgtgcgcctgcgccaattccgtaataatcgtcgttgttccaatatgttaaattatgaatactctcgtagcctggctttgcgaaattactgatttcgtattgatgaaaaccttgtttgtccatttctttcataagcagctcatacatcgctgcttcttcttcttgagcaggcagcggcagcttccccttgttcattagattataaaataccgttttaggttcaataatcaacgaataggcagacatatgctctacctctaatgaaaaagccgtttgaagcgtcgaagagaaatcagctaccgtttgttctggcaggctataaattaagtctaagcttatattcgacattccaatctttctcgcttgctcaacacattcaaatacctgtctgtttgaatgcacacgtccaattttctccaataatctttcattaaacgtttgtacaccaatgcttaaacgattcacgccataatcatggagaagctgaagcttttcttttgtcaattcattcggattggcttcaaatgtaaactcacctttttcgtcataagggaggtacatacgaatcgattctaaaaaatactccagctgctgttcatctaaggctgtgggcgttccacccccaacgaatatcgtgtttaaattggttgttggatagcgttcgactgtctgtttcatttcttctcgcatgctttccaaatacggcataacgggctgatttttgaaaaacactttattaaagtcacaatagtgacaaatatgatgacaaaacgggatatgcagatatgctgccttcaccatggacttccacctcaatcacatttataaatgataaaaataccgcagagtctctctgcggtatttttatctatgttcgttcacacttatttacagcgctcaaaactctttactatcgtatcagattagcttgattttcaaaactaatttgacatgttaaataatagaatttcagctattaatcttcgtccatgcgaagcacagccatgaatgcttcctgcggtacttcaacagaaccaacctgcttcatacgttttttaccttctttttgtttttcaagaagtttacgtttacgagagatatctcctccgtaacattttgctaaaacgtttttacgaatggctttaattgttgaacgcgcgacgattttttgaccgattgccgcttgaatcggcacttcgaactgttgacgtggaataagctctttaagcttttctacaatgactttaccacgatcgtacgccgaatctctgtgtacgataaaggacagtgcatcgaccgtttcgccgtttaagagaatatccatcttcacaagcttcgaaggctgatatccaataagctcgtaatcaaacgaagcatagccttttgtatttgattttaattgatcaaagaaatcatatacaatttcagctagtggaatttcatatacaatactcacacgattagcatccaagtactgcatatcaataaagttgcctcgcttcttctgacaaagctccatcacagcacctacataatcgtttggtaccatcatcgttgcctttacatacggttcttccacacgttcaatcttttgtgggtccggcatattagacggattatctacagacagatgagtctcgtctgttaaatacacgtcataaataacgcttggagctgttgtaattaaatcaattttaaattcgcgttcaatacgttcttggataatttccatgtgaagcaaccctaagaatccacatcggaaaccaaaccctaaggcctgagacgtctctggttcaaactgaagtgcagagtcatttagctctaacttttctagtgcttcacggagatcgttatactttgctgtatcaattggatacagtccgcagtataccattggattcagacgacgataaccaggaagaggttcacttgctccatttttagcaagtgtaatcgtgtcccctactcgcgtatctccaacgtttttaatagctgctgttaaaaaccctacgtcgccaacagaaagttcatctttagcaacggcttttggcgttaacacacctagctccgttacctcaaactcttttcctgttgccatcattttaattttgtcgcctacttttactcgtccctgtacgatacgaatagatgcaactacacctcggtatgcatcataaaatgaatcaaagattagtgcttgaagcggtgcatctggatccccttcaggagcaggaactttttcaacaatttgttctaaaatttcttcgattccaattcctgctttagctgaagctaatacagcttccgacgcatctaatccaattacgtcttcaacttcttgacgcactcgctctggctctgcactcggcaggtcaatcttattaatgacaggtaaaatttcaaggttgttatcaagcgctaaatatacgtttgctagtgtttgagcttcaataccttgagctgcatctactactagaattgcaccttcacacgcggctaaacttcgcgacacttcatatgtaaaatcgacgtgtcccggtgtatcaattagatgaaaagtatactcttctccatcttttgctttgtattgaagctgcacagcatttaatttaatggtaattccacgttcacgttccaaatccatcgaatctaaaagctgagctttcatttctcgctgtgttaacgcatttgttttttctaaaatacggtctgctaatgttgacttaccgtggtctatatgagcaataatcgaaaagtttctgattttcgattgtcgtttcaatcttgcttctctatccatatttttttcactcctactgaaaatcggcaaaatacactaaactaaattataacaacacattcgtcaacattcaataagcattccattggggatttttccatacaaaaaagcagaaagagattctgcttttaattaagaagatgatggatagccttaaaagcttttcctattgtactttttacgccttccgctaaactttgacctagcgaggagaaaaagttaaaagcctttcgtttttctagaaactgctgtttttcatcaatattcacgactttttttgaacctaaaacagcagcttccacctgaccatctgacgttttagaaacattaataacatgttcaatcgaagggtcattatatcccttcattttaatcaacccttgctgagccgtctgcatccctaaaaatacaatgcacagtaaaaaaatggttagcactactgattttaaagtaaatttaatcatattattaggccccttacttctttatcttctgtagtactaaccattatgactatattgtgaagaactcattcatctaaaagcgtattaatgagtatatgccccaaagttctcttgatccacttcatgatgcaaagcagcgttaagtcctcctgcaactacattagccatatcttcaataaacatatccacttcttttggcgtaaccatcaaattatggcctaaaggtgcaagcacttcatgaataagacgtcttttttcttcatcgtgaagggtgccaatcataccgagatacgtttgacgctgctcttcattaggtaaatcatcctccgtgagcttctttttttctccaaacgtcataccagatggaagcagcgacttagacggctttccctgctctttcatttctcggccaaaatgttttaagataaagtcaattgtatcgcttgtaatggaaacagcatccaccaccgttggaatacctattgcaataactggaatgccaagtgtttcataactgatttctttgcgtttgtttccaaccccagaccccggatgaatacctgaatctgaaatttgaatggtagcatttacccgttcaatcgaacgagcggccagcgcgtcgattgcaatgataaaatctggattcactttctttacaacgccaaagataatatcacttgtctcaatacccgtcattcccattactcccggaacaatggcgctaacgggtctaaagccatcttgcacgctttcaggctgtagctcaaacaaatgtcttgtaatcaacaaattatctactgcctttggtccaagcgcatctggtgtaacacttaagtttccaagacccactacaagacagctagcatcatctggaatgttgaggcttttaataaaaaaattcagctctttagcaaatacttcttccatggcctcttgcttttcagtatcctgttcgcgaatgcctaccgattcaagggttacatatcggccttttttcttaccgattgcttctgcgccttcttccgtaatttctaccattgaaattttgacaccttgttcttctttttcttttacaattacgcctttgatttctgactgattattcggtttaggctgattttctaacgctatgtcttttgcttcgacggctaaatccgtgcgcacgctatattgacttaaattaagttctttttccatttcttaacctcctagacaatctttgttgaaattattgtcaccgaggactggcagattcatgcatttaagaaatgaaaagtggaaggaagggcgcaatatcagctacaagcttttaaagagagctctgtcatataaaattccttttcaaggctattgcattctgtccttgtgtttgataaaatatcttttgttcttattgtgaagaatgtcgagttctatataatctcgattgttatcatttcgggaggtgaaacggatgccaaacattaaatcagctatcaaacgtgtaaaaactactgaagctcgccgtgctcataacattcaagctaaatcagctatgcgtactgcaatcaaaaactttgaagctttagttgaaaacaacgatgtagataacgcaaaagcagcatttgctgttgcttctaaaaaattagacaaagctgcacaatctggtattatccacaaaaatgctgcagctcgtcaaaaatctcgcttagcagtaaaacttaacggtttatctgcataattgagacaaaaacgatcccattaggatcgtttttttattgcgctctttttaataaaaacagctgtaaaataagcgctttatccattttccccgtcttcatttcataatctgcctctgctaaatcctttaaaatttctttaagctgctgttcctcaaaacttctgctctgctgcaaagcaattttcacacgaaacggatgaaccttaatcgtttgagcaatttgctgctgaccgtacccttgactagacagctgcttcgtatgataaatcaaacgaaactgcgtcgctaacaaagataaaattttaataggctcttcgttattacgcagtaaatcctgatacatatttaaagcagtagaaacctttcgctgaataacagcgtcaataagcgtaaatacattttgttcaagcgtttttgccacaagcttaagcacaacttcttttgtaatgactccgtcttgtccaacgtataataccattttttcaatttcatttgttacaagcgttacattaagacccacaagctgaataagcagcgtcacagcatcttcatccatattcactccatcttttgaaagtaaattatgaatccactgcttcatttctttttcaccaaattcgttcgcttcaatgtaagctgcttgtttttttaataattttgttattttttttctttcatccagcttttcataaggggctagtagaattaacgttgaaaaagacgggggctgctccacatattgctgcagttttgctagatcatgctcgactttatctttcgatttttcagccgttaaaaatgctgcatttttcgcaaccactacacgcttgtctcctaaaaaaggaagcgtttcagcatcttctagaacttgatcaatcgatgtttcttctaaatcgtatagtgacaagttaaattctttatcttcttcatttaacgtatagtcgacgattttatctctaatctttttactcataaatgcattgaccccgtgtattaaataaacgggggctatattatttttggtaatactttttaagctatcaactgccaacgtatatacgctcctcttttttattcatctatattgattatgtatagttactgataaacaaaatacaatttctatcgtaaaggtgttatgagtttttggcaacaatacaaaaggaattgccttaaaacgacaattcctcagtttatgataaacattaacaatataagccctaggttacttatttgttaatgattaaacccttatctctattttctcctcatgctcgtaaagtatagttgttaactgttgtcagtttgtgaaaacgcttttaaattgtctagatttttaaaaaaagttagattatactgtaaacaggaggggtgttaatgaaccaatttgaagaaagtgtccaaagtaaacgcaacgacgctgtcgattccgccgtaggatttggtgtttcatttggctttttcactgccttatttgttattgcaactgtgattcactacttgggttcgtaaaattgcttcaaggctgcttcttagcagtcttttttagttcgtttttcttactatagactatggaagttgctgcgaaaacgttcctgacttttttgtaaattcatacattaccccaccatcttcatccgttcgataaatatacactccgtagcttttcagaagctctaatatttcttgatgaggatgaccataacgatttttttgccccgctgaaacaagcgctactttaggatttaaatgttgaacaaactcttctgaagttgaagttttactgccatgatgcccaacttttaatacatctgctttaaggtttggaaagtctttcaatattctttgttctccttccttttctaaatctccggtgaatagccatcttaaatttcctaacttagcgtctattacaattgagccattgttgctcgtttcttcgaaacctgtcggagaaataatctgaaataacacacctccttcttgccagctatctccttgttgaacaatttgaacaggcacgctttgtttttgagcagcgatcaccaagccattctctacatcatttaattcagcttttttcccaagcaccagctctccgacagccacttgtgaaaataaatgctgtgccgcccctgcgtgatcataatcgccgtgtgtaataatcattttatctacccttgttattccttttgaatgcaaaaagggaacaagtacatcttctcccacgtcaaaagaagaacgacgtttttgccatggttcttttggaaatgaaacggttcctccggtatcgatcatatacacaccttttcgataaggaagctcaatgataaagcagtctccttgtcctacatcgaccattgtgaccgttccttttggattcaaataaggatacatacattgtgcggctaacaatgccacgagaagaaacatatagcgaacgaaaaattctccttcttcgagcgccacaaataaagcataaatgcataagtacatgcccaaaaacagcacaatgtggggttttcccgttacaaaaccagcgggaatccactcaaaagagccaagcaatttttcacaaaaaagtaaaagaacatgaagaatctgctccagcagttcactcactcccggcaagaggatacgaacaaaaagaatgagcaaacaaagaggtaatataacaagagaaaacagcggtacaaaaaccatatttaatggcaaactgaggagagatactccataaaaatagtacaacaataaaggaagtgaactgacttgtgcaatcgctgaaacaaccatgagctggctgaaagaagaatgaaaacgaggtaaaatcgtctgactcgataaaatcaatgcaaaactaacggcaaaagaaagctgaaaccctacatcaaataaatagtacggcttaaaaagcagcatggctataaaagcaaggctgatgctatcaaccaaaagaatttttctttgtatttttatcgatataagcatcagcatactcataaaaacagctcggacaactgaagcgctgccaccggccaaaaccatgtatacaggaagaagcaaaagtaaaagcgtaatggctcgctcgcgcgttattccaatccgaatgagcaaataaaaacacattgctgtcagcagtccaacatgaagacctgatatggcaagcaagtgtattaaaccaaattgctgatagcgcttgatactctcttctgcgatgccggtgcgctcgccgtaaattagtgcctgcataaacccagcgcctggatccgacatattttgttgaatataattaattcctttttgacgaataaaggtaaggtacgtaagtggagttagagtggggagctggcattttaccaaatcaagtctcttgacgttaagctgccaatgaatagactgatggtacaaatattgctgataatcaaatgcatgaaggttgcgagcaggtgaaggagaagttaattgccccgctagttgacaaacttgatgaatcgttagcttttcgagctgctgtttctcttccaacgtttttagtttataaaaagccatgacctcttcattttgaaccgtaaacttaaaagtaagtttgtcgccgtcactatgcggcacagaggaaatttcacctgtaaaagaagaagattcagttaaaagaaccgttttgttatgcttatttgtctcagctaataggtagacgcacaaaacactcaacagtgcagaagtaataaccactttcctcggacattgtagccattgaaaaatgaaaagtacgattagcaaaaacaggcttacagcggaatgattatcatatacatataaagctagcatcatgctaaaagcacagtaaatataatatcctttcacttttagctcctttcttcttaaaagaaagaggcttcttactgttaccaagaaaaaaacctcttttacctttaatttgccgtaaacaaagcgagagcttcacgctgtaaattcatcacttctgcttcgtccgctccgcttttttctaaacgagcgagaacatccgtcacaaattgaagcttctctttactttttaagtcaatgattgcgtcatcaagttcaacttttgctgttttcactcccgcctgttgaaataactcaacagcatacggatgatttttgtaatcattagcgtaatatactgttttaattcccgcttgaataagggctttacagcagtttaaacacggaaaatgcgtgacgtatacttccgcatcttctgttttcacaccaaacttagcacactgcaagagtgcattcacttctgcatggacagttcttacacagtgtccatcaatcacataacagccttcgtcagcacaatgcacgcctccgctgatcgagccgttgtatcctccagctataatacgtttatcacgcaccactgtagccccaacagccagacgttcacaagtgcttcttaaggctagcaaatggctttgtgccataaaatattgatcccatgaaatccggttcatctcattccctacctttttatttaaaactcaataattataattatacttgtctctttcatagtgtagcgtttcttttcctttttcgtcaataagtctctactgtaccgtaatttgagctttgattttttctagcgacttctcgccaatacctgatacttgccccaaatcctctactgtttgaaacaagccattttcctctcgatatgaaacgatggcactcgcttttgaaggtccaattccatttagcgtttgcagttcatcagtgttcgctgtattgatattaaccaggggctgatcatttgaagttcctgaggaagagattgaagaaactggagatgaaggcgggatttcttctccagtagctggaatgtaaacagccatttcatcttgtagcttgctagctaaattgagctgtcttaagtccgcctctttcgtagcgcctccggcttgtgctagagcatcttttacccttgcgtctttcggaagctggtatacaccaggcttctgaacagctcctttaatatccaccataacaaacggggaatcttggctcgaaattacttgatcagacgactctccttctttttttgcagcagaagattctgcctttatcatatctgaggtttgaagagaactttccgatttctctccgcctgtgcgatagatataaaaagccaacccaattgctaaacaaatacagccaattagccattgtttttttgaaaaagtcaaattgtacactcctttgaattttgaagtaacgtcataaattccattacgtcttcatagtgtttagaagaaaaggcttttgaaggagggaatgaatcagtgaacatagggtttatcggaacaggaaacatggggaaaatattaattgatgcgtttattgaatcaaaagccgtacgtccttctaaaatcactattatgaatcgcacaaaaaaaagagccaaagagattcaacagcagcataaaaaaattaatgttgctgatacagctgaagaagttgttcacgcatccaaagtcatttttatttgtgttaagccattggatattcacccccttttaataaaattagaaccactgctgacgaaagatcattgcattgtatccattaccagtccaattagcgtagaacaaatcgaacgcctcattccgagtcaagcagctagaattatccctagcattacgaatcgggcattagcaggtgtttctcttttcacgtttggagaaagatgtacgcctttttaccaaaattatttacatgaattattttcatctatgtcaaagcctgtggctattgatcaaacgattacgcgtgtatcatccgatatcgtaagctgcggtcctgcattcttcagctttttgcttcaacgctttattgatgcagcagttcaagaaacaaatatttctgaagaagaagctaccgtcatggccagtgatatgattattggaatgggaaaactgttggaaaaagaaatatttacgcttcctaccttgcaggataaagtatgcgtaaaaggcggtgtaaccggagaaggtattaaagttttagaagctgaactcggagagatgtttgtgcacgtatttcaaaagacacatgaaaaatttgacgaagacattgagcttgttcacaatcagtttgatagtcttattccataatttctgtagaaatcctgctttgaaacaaaaaaagaagcctctactcggcttcttttttttgcgcagagaaaaagatgcgctcactgtttgaagtaggctcactcattttgaaatctgcacttacttctatatttataaaaccagcttcgctcagccatgattgataatcgtcaatcgaccaagtgcgctgagcatgcacctcatcaaagcgatgatatgcatccatttcttcatcataagcaaaaaacgtaatatcatgctctacgcgcgtgtctgtatcgtcataggtgcagttccaaatatatgacacgtcttcatctacgtaagaaaaagattgatttccaaatacgtctttcatcttgtgcactgaatgaacatcaaatataaagagcccacctggttttaagtgcttatatacacgttgaatggtttcttgaacttctttatcactttgcaaatagttcaaagaatcacaaaagattactacacagtcgaactctttcaataactcaagttccgccatgttttgctgaaaaagagatagcgttaaccctgcttctgccgccttttcctgggctaccataagcatatcatcagacaaatcaacgcctactacggagaaaccttcttgtgcaaatcgaacggagagttctcccgtgccgcaggcaaggtctaatatactgtcaggcttttttttcgcttttgccacctgctgattaaaaaattcagcccaatcgtcatacggaacgtctgccattagctgatcatatacgtaggcaaattctccgtacctgctcatagctgtagctcttctgaacttacaaatggtgcatctccccataagcgttctaagttataatatccgcgctcatctttatggaaaatgtgaaccacaacatctccaagatcaacaagaacccacttagcctgctcaaatccttctaaacgcttcacagaaatgccttgttcgtgtgctttttctttaatttcacgagcgattgcctgcacttgtttatctgagttaccgtgacaaataacaaaataatctgccacaagtgagattccttccatatttaacgctacgatatcgattgcttttttatcgtctgctgcttctacaacaagagatagcaattcacgttcagtcatgtgtttgacctcctaagattaaatcattatatgtcatcatcgtatcgggataaacggcctgatgtttagtcattaaaaaagaaatggtgtttttcagtgattgaataagtgctgcatttaagtccgttttagctaactcccgcacttcatcaacacctggaaatcttcttccgggttcaatgtaatcagcaacgtacacaattttttcaagtaacgtcatgccaggtcttccggatgtatggtaagcaatcgcatccaatacttccttatccgtaatccctacttcatttctcactaaaaacgcgcctactggagcatgccataattcggtattgtattccaataaagaagggctcatgttttgatcaataataatttgcttcatctcttcctttggacgaaatttggcgtagtcatgaaaaatagcagccagttctgcttttttttcgtctgcttcaaaacgcttagctaattcaattgctgtttccattaccccgacagtatgaatataacggcgttctgttaactgtttctttacgatttctaatgcctcagttcgattcatataattgattctcctcgatatattgtttaacaccagcaggtataaaataacgaatggtttctttctttactactcgttcacgaataaaggaagaggagacatcaaactgcggaacttctacttcttttatcgggtaaggggacgtaatggtataccccgggcgttttacacctacaaatgtaaccaaattgactaattcatcaatttcataccacttcggcaaatattctaccatatcagcaccaacgatgaaatgaaactgatacgttggatatttctccgttagtattctcatcgtatcgtatgtatatgaaggctctttgcgctcaaattcgatcggctgcagggtaaattgatcatgttcttcaatagctagctttagcatgtgtaaacgatgatatggctcaataggctctttgattgttttatgaggtggaatgtacgacggcatgaaccatatctcatctaatttcaaggcatgcaaaacctcatttgccatcattaaatgccccaaatgaggcgggttgaatgttccacctaaaattccaatactcttcaacaatccccgactcctttaatttacttcatttttaaatagagcgggtttccccgctctatttcatttcacttttggaagcattaactgcttattttcgcgtgattctttatataatacaattgtatttccaatcacttgtacaagctctgcttttgttccttttgttaatcgagcagcaaccgtatcacgatcttcgtcacagttttgcagaatgcttacttttaataattctcttgcttctaatgcatcagcaatttgaccaatcatattttcgttgactccaccttttcctacttggaaaattggatttaaatgatgtgcttttgaacgtaaaaaacgtttttgtttacctgttaacataaaaacctccgttgtatcttatctcttagttagtgttgaaagaacaatgtgttccattgcctcttcgtcaggacggacgttcgtccacttttcaaatgcaagtgcaccttgcagtacaaacataccgacaccgttatgagtgcctgccccttttgcttcagcctcttttaaaagctttgtttttaaagggttgtaaataatatcgctgactacggcttctttttgcaataaagtaagtgctaatggcagctcatccacgttaggatacattcccactgaagtggtattaataataatatcgaatgtatctaattgtttttctgcatcagaaatagacatcgccgccgttttcgtcgaaaaaggcagctcgttagctaatacagctgctttttcgacggtacgattgcatatcgcaattacctcgggagcatgctgagctgcaattgtataaaaaatagcttttgcggctcctccagctccaataattaaaattctttttggggataagcttccttctactgctttgagtaaagacgtcacatacccctctccgtcggtattgtatccaatataacggccatcttgattaacaactgtatttacagcgccaattgcctttgctaatggatcgacttcatccaaatgcttcataatatcaactttataaggaatcgtgacattaaatccttgaatgtttttatcttttagctctccaatggctgactcaaaatgaacaggttcaattggaaaagcttcataatgagcatccatattcagacgtttaaaggcatcattttgcatcaatggcgatagtgaatgcccaagcggataaccaactagcccatataatgtactcaagattttttcccctttttgtttaaattaaagaatcgcgcacaaatacgccgactccttttggtgcatgcgccacaacttttgaacctgactcattaaccgtcacccagcccagccctgaaaaaacaatatccgttttttcattttttattgtaaattcatgtgcaaccagttcaggaaactcatccatttgctctgggcgcggcggctgaagcagttcacctgcttgcttttcatacaactcatctgctttttcaagcttcgtacgatggatatgcaaatcgtttgatacataacatgttaatgatttgcggcctccctgtacataatctaagcgcgccagtcctccaaagtataacgtttgcccttcatttagctgataaaccttcggctttatttcctttttaggagaaatcagctttaagtctcgtttatctacatagtgagccatctgatggtgattaataataccaggcgtatcatataaagacgcgccgttatcaagcgggatatcaatcatatccagcgttgtgcccggatattgagatgtggtaataatatctttttctcccgttacttctttaataatggcattgataaatgttgatttaccaacgtttgtacatcccacaacatatacatctttaccttcgcgataatgttcaatggcttcggcaatttctcgaattccttgtcctttttgcgcgctcatgaggaacacatccactgattttagcccaagctctttcgcttctcgcttcatccaatgaattagtttatttttctttatagactttggcagtaaatctgctttatttcccactaaaagaaccttgttatttccaacaaatcgatgcaaaccaggtaaccagctgccgttaaagtcaaagatatctacaacttttacaactaaaccgtccgtttgaccaattccatttaagatttttaaaaaatcatcgtctgttaaggaaacatcttgtacttcattataatgcttcaagcgaaagcatcgctggcaaataataacttctttttctagtgctgattttggagcatagccaagttcatccggtcgttctgtttgaatctccactccgcatcctacgcactgtaatttttcttcactcacgttttaatcctcccagttaatcataccttttcgtttcatccaacctagaattcttcgttccattttacggttaaatttcgttacaaatccatctgtttgcgcaactggtacaaccaaaaccgtatatacgccgagacgatttcctcctaatacatccgttaaaagctggtcaccaataactacaacctcatctttttgcaactccatatcacgaagagctcttctaaatgctttacgcatcggtttgcgtgctttatatacaaatggaagtccaactggatctgaaaacagcttgactcgtttctccacattattcgatacaatcgtaattttaattccactatctttcattaactgaaaccactcaattaattccggagtggcatcagggcgatcccattccaccaacgtgttatctaagtcggtaataattccttttattccgcgctctttcaaatcgtctggcttaatttgaaacacgtttttcacatgttcatttggtaaaaaaagtttcaacacgtatcatgcacctcgaatatatagttacatactaaaattaacgccgtctatcattataacgacttcttgttattttccaacctaaaattttattctcttcaaaaacaggtcttttcttagtataaaggatatgccttgtgaatgctttaactttatacagaaagttattgacaaaaggtagcaaacctctatttgttcgtaggcttacgatatattcactctctgcaaacttaaaataaaaaatagtgcagaaaacgtttattacttatcaaatagggtaagtggtaaacaaattctgttaaaagttttcgacaaaaaatgataagcctaattatgtggataagtttatacacattatcctctgttatagttcagcaattaatggtaattataaacaacatacccacattttatccaccgaaagctgtggataacagaacgattgttcctttatttgattcatgttagattataaataaggaatttattagcatttaaatataactttttaggatatttattttagtaggaggtggcggcaatcttatgagaaaattatcagatgagctgcttattgaatcatacagcaaagcaaccgaactgcagttaagccctgattttataaaattaattgaagaggaaattgaaagaagatcattaaagattagcatacaaattccttcttaacgaataaaagagccttcttaataaaagaaagctacatcttcatttatctatctactcttttattatataggctctattttttcaaatgagcaattggttctccatactttacataagaacctgagtgaacgttagaatcaaaagtgattgagttcttctcaaataataaaatgacagtcgaaccaaacgtgaagtaagccatttcttcccctttttcgactacttcttttttagaaaccgcttcaatgctgttgataaacatggctcctacttttaccatcagcatgtgaccattttcaaatgttaactccgtgagcttccggaaatttttcaccagcggttctttcccgtacttgattcctaatgaatttactggataagacttttgtccaacagtccacgtattccccacttgggctttaagaggactgtgaatgcgatgatagtctttcggactaagatagagaataataaactgtccttctatatatttttcaagaatgagatcatttgaaaccatttcctgtatagaataaggtttgttttttacaatcatttctttttgaggcgtaatgactccatatgcttctatctttgcatctacaggactgacaacgctgtctttctgctgatcgaccggacgggcagaaggattcaaacggcgaataaatagctcgtgtaaggtttgatagtgatgcagaggcttgtccatttcttctttatttactttaaaaacttttgtataggagggtataacaaaccgactccatttagagaaagtgaattttcgaatgagcttcgatgatccttgatgattcgtaagctcaataaatgttcgatacaggtgctgcaacaataattttacctccacatactgaatagttctttactagaataaggtttgcgtctacaatgaaattaccattatttttacctttagttcattccatcctttaaaggagtgaggaaattgtttttattagagtatctagatcatacaattaaaaagctgagatcccaagcagcaaactccttaacgattgttaatttaagtttaggaagctttgctattttatttgtcatgaaaaatgaattgaacttaagtttattactaatttttttagcagcgttagcagaccgattcgacggcatggtagccagaaagctgcaaattgaatctgaacttggaaaacaactggactccatgtgcgatattatatcatttggcatcgctccagctctactactttatcaaagtattttgtctcactttggtgctgcaggttcaattgttaccatctgttacattgcttgcggagcacttcgtcttgcccgctttaacatcacagaaaatactgggtattttacagggctccctattaccgcagcaggttgtttattaactcttagctacttgggcgtcccttatttgccttcacacttttatatgtttttaattatcgtactcgcttgcttgatgattagtactttcaagctaaaaaaagtgtagagctccatttacttttgcagaggaatattatcgtcttgcttcttttcttaattatagaataaatcatcttctttaagaaacaaagcgaaaattccttaagaattcttaaaaatgaatgattctattcggtaggatatgtcatctaaaaaaactcatgcgcatgcatgagttttttttaataccagcagctaaaaaaccaatagaagcttccgaaaattaataacaggacaaacagaacaatcaacaatccaagtccccagccgaagcctcctccacatgggtaagctggataattaggataacagcagcctccgtaaccgtacatactttccctccttacactatgaactactattagcgtatgtacataccttttccctgtataggctggtaactatctataaagaaaaatctgtggactttttcaaactctcttgtccccggggggaattttaaacgtacaggcaaagacatccttctttttacatatagtgtaatgttagtctctcacaagttgatatccccttatggaggtgaagagatgtctgcattatttaccgcactaggctatttctttaaagaattggttttccttgtttcctacgtaaaaaacaatgcctttcctcaacccttgtctgctgctgaagaaaagagatatttatctttaatggaacaaggagatcaagaagcgcgaaaccttcttatcgaacacaatctccggctcgttgcgcatattgttaaaaagtttgaaaacacgggagaggatgcagaagatttaatttcaattgggacaatcggtttaattaaagcaatcgaaagttattcgcagggaaaaggaacaaaattagctacttatgccgcacgatgtattgaaaatgaaatattgatgcacttgcgagcgctcaaaaaaacaaaaaaagatgtgtctctgcatgatccaattggccaggataaagaaggaaatgaaatcagtttgattgatgtattaaaatcagaatcagacgatgtaattgatatgattcaactaaatatggaattagaaaaaataaaagaatacatcgatattctcgatgatcgggaaaaggaagtaattgttggtcgcttcggtttggatctgcaggatgaaaaaacccagcgagaaattgcaaaagaattaaatatttcaagaagttatgtttcgcgaattgaaaagcgagcgctcatgaaaatgtttcacgaattttacagagccgaaaaagagaaaaaaaagagcggaaagaaggagaattaatccttctttccgctctttttttaaaataatttccaaatgataatccgtagcaaacacatcattactccccctactaatcatttaggtggaatctttctccacaagcagccatacaacgatatatcctttttgattaatcatcattcatccactcctttccactgttcaaattagaaatgacggtaaaactcatacttgcggtcttttatttcttcttctaattgtcttacatactgttcatgcttaatttctgcctcagagtattgacgagactttatggtaatagttaaaaagaaaatgttcagtgtcattacaatcacctccttatacacaaaaaagccacagtaatgcataagcatcctgtggctgaaaaataataaaaaccacagggctactattcgcacctgtggtgaattaacgtgttttaatgatcaaagtaagaaagttacttgatacaggaacacggccgaatagtatacgtatatagacgatttttgaacatagttgaaactggatgacccataactgataaacgtcttaacatatgactcgacctccttttaataaagtattttccttacaatggtaattatatccacggactcataaaaagtaaactgtttttttgaaaaatagggaatttttttattttttcaaccctcataaaaaaaagacgatatatgatcgcctttttatatctattattctttttctttcattagttcttttttcagttttttagtttgataactaaaataaaaggcaagggcggcaaaaagaataacgatggcttccattattccaagctgcatatcacttttttcaccttggccaatcataacaccaatgtacaagaatgtacttacggctagaaggacgtaaataaagcggctgtaatcttcaatttttgctttgatgcgttgagctttcatacaatcaccttctcagtagaatgttataactctactctatcatagatctataggtctataaaaatcctatttttaccacccttatttcaatgcctcttctaagtcttcaattaaatcttctacatcttcaaggcctacagaaatacgaattaatccatctgtaattcctagctctttacgtcggtcgctcggtatagaagcatgagtcattttagaaggaatggaaataaggctttcaatggctcctaaactttctgctaatgtaaaatacttcactttgctcagtacttgttccgctttctcttcgcttcccacatcaaaagaaaccattcccccaaaacctcttgcttgctttttagcaatgaggtggtttgggtgggtgtttaatcctggataatatacttttgtaacagcaggatgagcaagtaaaaattctactattttcccagtgttgaattcatgttcttccattcgtattcctaatgttttaatccccctcatcaaaagccaagaatcttggggtcctaaaatgcctccagtcgcattttgaataaaatggaggtcttctgccaatttaggcgaattcacaacggctagccctgctacaacgtcactgtggccgcctagatacttagttgcactgtgcagaacgatatccgcacctttttcgatagggttttgccaatacggggtactgaatgtgttatcaacgatggtaagtaagtgatgctgtttagctactgaagaagcctgctgcaagtcagtaatttttaggagaggattcgtgggagtctcgatataaatagcttttgtgttggggcgaatttctttcttaatattttcgatgtcgcttgtatcaataaaagtagcttcaatgccaatacggctcagcacttttgtaatcactcggtacgttcctccgtatacgtcatctgtaattagcacatgatctccgctgttaaacagcatgaatacagcagtagtagctgccataccagatccaaacgcaaacccagcatatcctccttcaatttctttgataagttcttctaaggcgtgtcgtgtagggttaccggttctcgaatattcgtatcccgtatgttttccagctccctcttgtttataagtgctcacttgataaataggaacagagacagcacccgtctgttcatcgccaacaattccaccatgaattaattgtgttttacgtttcatcttatcttcctccactgtaaatatttttacttaagtaccgttcgctgctatcgggaaaaatagtgacaatatgagcgcctttttctgcattttttgcttcgagcagggctgcttcgaaggctgctcctgaagagctccctactagtaacccttcttttaaagccagctctttcactctttgaaaagcataaacatcttcaacagtatgaatagcattaaaataagaccgatccatataatcagggatgaactccattccaattccttcagttaagtgagggccggatttcccaccgtttaaaatcgaaccttctggctcaacaatgactgcttttagagaaggatttttttctttcaaaaattttgctgtacccataaatgttccacctgtacctgctccagctacaaacacgtcgatttttccatcaagctgttcatatatttctggccctaaggttttgtaataagtcataggattagccggattagcaaactgctgaggacaataagaaccaggtatttcacgcagcagctcttgagccttgtttatagcacctttcataccagcttcagtaggtgtttgaaccacagttgcccccaaagccttcataagctgctgtttttcaatactgaatttttctggaacacataatatgacgtttatttcgtgctgaagagcagctaaagccagcccaattcccgtatttccagcagtaggctcaatcaccgttccgcctcgcttcagtcttccagagctaagagcttctttcagcagttcttttcctaaacgatcttttacacttcctcctggattaacatattccagtttagcaaatatcctgatttctctgggtaaatcaaattgtgtaatctcaatcacaggtgtgtttccaatcaattcatgaacgtttttggctaccttcataatcttgaacacctcgctaaagaataatataacttaacctataaattaagtcggaattaaagtgaaaatatagtctacaccccatgttatgataaacgatgcagagtgtagacgaaaacaaactctatattttacgaacagcttattttaattttgtaataaaattcaatactaatttcgttgaattaacagctgctttttctaaaaattgctcaaaagaaacatttgattctttgccggcgatgtcagaaagagcacgaagaataacaaacggtacgtcaaattgatagcatacttgagcaacggccgccgcttccatttcagctgcatacaggtctggaaacttagagcggacaaactctacgcgcacaggatcgttcatgaacgaatcccctgtagcaattagtccttttacaattttcatatccgttacttcaagagcgctttcttcagcaagacgaactagtttttcatctgctttaaaagctgcaggcaagtttggtacttgaccgtattcatagttgaataccgttacatctacatcatgatgacgaacttctgttgaaataaccgcatctcctacgtttaactccggatggaagccgcctgctgatcctgtattaataacgtaatcaggtttgaacttttctagtaagatggctgtagataacgccgcatttacttttccaatacctgattttaataatacaacctccacaccgctgattgttcctgtcgagtattcacatcctgcgattactgtttcttgacgattttcaattttatcgcgtaaaatcgtcacttcttcttccattgctccaatgattgctactttcattttaaaacctctttctactattgtttcgttgcctccaatacccacacaaagtgattaaattgtgtaaaggttatgtgaaaaccattgctttcaaagatttgctttaagacgggaatggttgtatagtattccctctctagatcttctgctagttgcgtatacccttttcgttttgcctgaacaatggtatcagcaaatgaatccgctgtttcaaacattgtatcagcaaacactattttaccaccggtttgaagtaactttccatagtttatcacagcttcttctttttctttatctgttaaatgatgaaaagcatacgtactaactaagctctctgctggaaacaatgatgtatcaaattgtaaaaagtctcctggtgtgactaaaacatctgcccctaatttctggtgtgccaattgtctcattggtactgaaggttcaattcctactacagtcagttctttttctaacagtttttttgttaagtttccagtccctgttccaaattctatcacatgccctattgaacggtctgctacatactctaagatttcattataattgcgaaacacttctctatactgttcatctttcccgcttaccgatgcatcatactcattcgcccacttttcaaagatatctaaaaactctagacccataaaaaacgcctccttataactaataattcttatggatatagtatgtttttagctatcgtttgttcttcatttataaatattttaagcttttaactttctatttgctatactatagtaatgaggtaaggaggtcgtaagatgaattttgaatttgaaatgattgaagataaaatagaattttttgaagcgcctgatgttaaaatgcttgagaaacaaattgcggaaaaaattgatcaaaataaagcgattttgcttgaggtgcatagcgtatctcatcaaatgtctgtggactatgaacaaggtaaaaaactgtactctgcggttgttcatttcaaattaaaaaagcagcgctagcgcgctgcttttcttattgaagcttatccactactgcgggcttccagccttctccatctacccattcaatttgaacgcgatattttgttgatgagttgcctttaggactaaccgtagctacggctttacctacgccaccgttattccctaaacgccatacggtcatattgcttgggctaatgcctgacccttcgcctacagcttttagcatttcgttccaatccgttgatccttttttataagttgctgcaggtgcatcttgtgacgtacctactgaatcccatgaaggatctaccttgcgttctgccacgccaggctctggatttttctctacttcagcctgtgaatctgagtcatttgattcttcatctgttgcttgatcatcttcagagctttggtcatcttcagaactttgatcgtcttcagaactttgatcgtccgttgcttgatcatctttcgaagaatcatcgtcttttttagccgtcttgtccgttttttggtcatttgtttgcggattgttttgagttgtttccgcttggttatccgatttatccttatttccaagaatcatcgtaccaccgacaaatacaattaaaactgctacgacagcaattaacagattatataatcggtttacttttttttctttgttttcgtgtcttgaagaacgattgttattcattgctacaatttcctccaacttttataatgctttattctaacatgtgttttcttatacatgaagcatcaaaatttatttgaagtatatttgtaatattttttacaaattcttcttgttttaacgtgtatttaagtcatacatccctttaacaatatcataaaatacgctgtttgtgggagatatcgcactttttgtatttaaatccactactaccattgcatattttggatcatctgcaggaaagtaacccgcaaaccatttattgacgatatcgtctttcacattgatttcagcagttcctgactttcctgccacttcataaggaagggtttgaaatcttcttcctgttcctttttcgctctgtacgacaccttttaaaagctgctgcatagaagcagctgtggctttattaatgctatctccttttagcttatgctctttaaacgtatacaatgacgtgttgtttttatactctagcgcatctacagcttttacctgtttcttttctcctccgcgtgcaattgtcgccatcatatttgctactgcaagcggagtcacttttacatcaagctgtccaattgccgtttgagctacagcatttggtacttttttttctctttcatttgtccaaactcttcccgatttttctcctaaaaactgcttaaaatgttcaaaatgaaacacatcacccgtccatcctacaggctgaataagccctaacttatcggcatattgttcaagggtattcggattagatattatcatttcttttgctagctgtgcaaacgttgcattacaactttgcgcgaagctttcttcaaacgtcagctgccctttttgatgatcttcttctacattattgccataaatacttttatcgcagttataggtaaaagaaggctgaattttattttgttcaagcgctgcagctgctgttacggttttaaatatagatccaggagtttgtggcgtcagcaaacgattttctacgctgtctgaaccattttgctttttaaatggatctttcttattaatcgaaggcctgctggccatcgcaattactttattgttttttatatcaattaagacggctcctccgtcttttaacttataatgatttaatgtattctccactagctcctgagcagacaaatcaagcgtcgtacgcacactgactggataataagggttagctgtgcctgtgtattttacatcgatgccaaacataggcccacctaggcgatcaacatgataaaggagcttagactcctgttccggcagcaaaaactcgtcaaaagccctctgcatccctgagatacctacaggcgtagttgatttaattgctccatttttcaatttgtcactatacttctcttcaattatttgtctgctttgtgcctctagtccgattaaatgttcagcaagaggaactggacgctcatcttttagaggaattccaaatacgccaggtacctttaatgcatttattttttcgacttgtgcatgggataattcttttgtaataacaaccggtgttttagcattcgctagtctgttcgttagttcctttggttgcattcccacgatttcacttacttgctgaacaggccacttcattttttctaaaaacggaaacaggactaagcgattatgcgtgatagatgttaaagactgtccatttttatcttcaaatttccctcgcccgtcatctaccaccatttcctgcgtacgctgttttacgcttccttcaattaagttaatctttttgtcagtaaaagattctgtgctgacaagctgaagttgaacaagccgtgctcccagtccactaattaataataaaataaaaataagagtaatataaattcgcttgtgaattattttcatgactacacctcactctttacaagtgtcgacgttgccattacttttaaaaccattatcttaagaaatattcattctttttttcatttcacaaaaaacttgctgattcagcaagtttttattattaattttctgttaaaaattgttgagttgttcttagctttcctattttcggaaagatgtaagaaagagttgcttcatgctcttcttttgtaaatgtcgccatggcatccgtgataaaaatttggttatacccatactgaaatgcttcacgagctgtgctttccacaccaatatttgttgcaattccgcaaaggacaattgtatcaattcctcttcggcgaagctgaaggtctaaatctgtcccaaaaaaggctccccactgacgttttgtcacaatataatcattctcttgaacattaagtcttggatcgaattccgcccagtctgcaggtctttcttgaggagcagatggcttttgatccgtttctggcgtcaacgcatcttttccatcttgaaaatctactcgtacaaaactaataaatccattttgttcgcggaaacgattcacaagctgaacagatttctccacaatttcgtctcctccaattggaacaatccctttttgtaaatcaattaaaacaagcgctgttttagcaaaatcgatatctttcattttcatctttcctttcttacatatcttttctattctctccgctttttaaaatcatataaaaaaagctgacgcgtgtcagcttttttacttacgagcattcagtagaacgcttccaaccagatgttttacttaacagatacaattttcactgacatatctccaccaggagtttgaacagttacttgatctccaatttgtttgcccattagacttttagcaattggcgaatcatttgaaattttcccttcaaacggatctgcttctgcactacctacaattgtatacgtttcttcatcaccatctggcaactctacaaatgttacagatttacctaatgatacaatagaagagttttctacatcttcttcaataattttcgcattgcgaatcatattttcaagcgttgtaatacggccttctacgaaagcctgctcgtcttttgcagaatcgtactcagagttctccgataaatctccaaaactgcgggcgattttgatacgctctacaacttctttacgttttactgtttttaaatattctagctcttgctctagctttagctttccttcttctgtcattggaaatactttttcttgtgccataatcccttcactccttcttgaactcaaaatctctagtgtatacagtccatttctgtatgtacaaaaaattttccactctgtggaaaaatcagttaatagagaaatgacagcttcaaaatagaagctgctcgtttctctattctttataatgtttgtgtttagttagcagaatatgtctgcattgtcttcaaaaaaattcctgcatctatgctatgttattataaaatggcattttgttcaagaattgtttgaattttagtgaccatcaagtcaatcgctacgtggttttgaccgccttcaggaatgataatatctgcataacgttttgttggttcaacaaactgattatgcatcgggcgaacgacagatacgtattgatcaacaactgactcaagcgtacgctctcgttctttaatatcacgaagcatacgacgaatgatacgaagatccgcatctgtatctacgtatagcttgatatccattaaattacgcaagcgctgatcttctagtacaagaataccttctaagataataacatcttttggttcttctctaattaccttttcagagcgcgtatgaattgcgtaatcatataccggtttgtcaatgctctcataatttaataagttttgcaagtgttcaatcagcaaatcattatcaaatgctaaaggatgatcgtagtttgtttgcaaacgctgttcaaacggtacatcgctttgatctttataataatagtcttgctcaagaagcataatagaatgccctttaaaatattcataaatagctttggttacagttgttttaccagaaccggatccaccagcgataccgattacaacgggctttttccccattttatatttaaatcccctttcgcatcatgttatatgaaaatagaggttggtccactttaaatttcacaatttgcagcggatgacgcgcagcatctagttcattgccatcttcgtcccaaattttatctattttttgcgtaaagtttttaatttccggaccgaaaaattccacttcttctcccggtttaaaatagttacgctgttgcaatgtcacgatgcttgtttcttcatcataattcaatactaaaccagcaaaatcaaattttgttttcttgccgtgtacgccaaacatttgctcatctactccaggaactccttcaaaaaaggcaggagccgtatcgcggtttgcacatttgtctagctcatcaagccattcttgttgaatcacaaaattctcaggatctgcacagtatgcgtcaatcaccttgcgatacacgctcaccactgttgcgatatagtgaatcgacttcatacgtccttcaatttttaagctatcaatacccagctcaatcatttgaggaatagattgaattaaatttaagtcttttggactcattgcaaacggatcgtcttgctcatcaaataaagccgtttccgttttaccgtcttctactttaaataaatcatagtcccaacggcatgattgacagcagcctccgcggtttgaatcacgcgctgtcatatggttacttagcacgcagcggcctgaataagcaatacacatcgctccgtgaataaaagcttcaatttcaatatccactttttctttcatttcgcgcatttcttcagcacccgtttcacgagcaagtacaacacgttctaatccttcttctttccagaactgaacggctttccagtttgaaagtgattgctgcgtacttaaatgtacttcaagcttaggtgcaacgcgtcgacaggtttcgataattaacggatcagctacgatgattccagaaacaccagcgcgctctaatcccattaaataatcttcaagtccgtccatattttcattatgagcaaaaatgtttgttgtaacataaatacgtgcaccgtatttgtttgcaaactgaacaccttctgccatttcttcaaatgtaaagttatctgcatttgaacgaaggccaaactcttttcctccgataaacacagcatctgctccatagtgtacggcaacttttaatttttcaaggttaccggctggagctaacaactcaggcttcttagtaataactcgtttaccttctactacagtatcgatttgaacagccatcgtttgtacctcctttgtttatctttctttgcatgctttttaatataccgtttctttaaagaaaaaccctgtgtctaacggacggttaatcggctgtaagctttcaatttcttctaacaaatcgtctttaatgttttcgtattcttcacggtcatctacacataaatcaatcgcttgacgatatttttttgttacttctaaaatatattgcggtgactttaatacgccgtcaattttgaatacatctacttcagcatcaatcatttcggaaagctcatcgataatgcacatatcatttggactcataatgtgcgttccattttcatcttcgaaaattggatatttattgtttcgctcattatcaagtaaaaacatatctttttctactttacgattttcaatttccatgacttttccttgatactcaaagtagttgccaagaagtgaacgttttgattggaacatacacgtcatgccatgcacctgaacttcaatttctacttcggctttttctttgatatcaatgatgctatccatgcttagctcacgagcaagaactgcgcgtttagctcctttacgcccccagtagttacatgaataccagtttgtgcccgttgtttcagtactccagtgcatcttcatttctggagctgtttcacgcactgccatcaatacagcaggatctccaaatacaatcgcatccacgcttgcttcttttaagaataaaatatattcatttagttcggcgattttatcattgtgaaataatccgttcatcgctacgtagacttttgcattatgctgatgagcaatatttacagcttctacgatatcttcacgtttgaattcacctgctaaacgcaaaccgtagcgctgttcaccaaccataacagctgttgctccagcttgtagtaatgattcaatttccgaaactgcagtgggtgtcactaatagttctggttttttcattcttggtcacctcttttaatactaatcgcgattccgtctccaatagggagaatagttgtataataatcgggatgattcatcagccacgtattgtatgcctgaatttttttaattaagctgcggcgtcgacgtgtttctacttcggccaaatcggtcgctacgtgacctttaaatagtacgttatccgaaataatcattcctttagaagacagcatcggctcataatgttcaaaaaaacgctgatattgacctttagctgcatcaataaaaactgcatcataaggaccatgacgttcaatctcatctctaagctctagtgcatctccaaacaacgacacaattttatcttgttttcccgcccgttcaataaattcttgcgctttttggtaacgctcttcatttcgttctaccgtaaccactcgtgcctctggaagcgcatgggtcattcgaatagacgaatatgcaatcgctgttccaatttctaatatatgttttggctgatgaagacgaagaatttgcaatagcgtttcaacaccaatcaattccataatcggaacgtgatgttcttttgcataagcttccatttcttcaataagctcctggcgcttaggaataagcttttccacatactgctctacgttttgtaaaagcaaaacacttcctccgttctcagaagtacattttacattatgttttcataacgtttcattactgcaaaatagtaagacaactagtctattataagtttttttcgtttttacgtaaacccgatatattttaacataaaagatggggaatgcgaagtatcgcgattccccaattttaaattcccacttatttttcggtattttgcttttctttacctgtaatatgcttggctttttctttgttatgttcttctaacgttttggtaaaaataactttcccttcaggtgtggccaagaagtataaataatctgtattggctggatgtaacgcagctttgattgacatcaaaccagagctggcaattggtcctggaggcaacccttttactttatacgtattgtaaggagagtccacttctaaatgcttatagaacacgcggtctttatgctctcctaaggcatataagacggttggatccgtttgaagcggcatatttttttcaaggcgattataaaagacgctggcaattttttctcggtcgacttttgcagttgcttcctcttcaatcagagaagacatggttaacaatttatgtgcactgaattttttcttctccatttgcccactgtactgacctaatacattatttgttttccctaccattttatccaatatttcatctaacgacacatttttatcataaaaatcatacgtaacgggatataaataaccttctagcggatgtttaatatctttttgcatcacttcatccgttactaaatctggatatttttctttcattttattgacgaatgccttatcgtctagctttttcatgacttcgtcttttgtaaactttgtatttttagcaatgatatcagcaatttcgacaagctgacgtccttctggaatggtgacacgaatatcaggttgttttgaaacctcgcctttttccattttttcaaccatttcccctaagctcatggaaggagaaaataaatacgttccagcttgaaatccagacacatgggttaattttacgtaatagcgaaatgcacttttgcttttaattaaatcttctttttgcaataccgtaccaatcgattggacggaagaaccttgtggaatggtcacatttacttttttattgctgtttcgatccacgggcgttaagcgggattgagcatagaaaaatgcaccgccaactagtaaaagaagtacgataattgtaataaaaataactcgtttttttcttgaacgattaggtggtaaaaatgtttgttgcgacaagcagcttcctggttaaatctacttctgtaaaagaagatacaaccagtttcacctcttttcttcttgattttttataagtatgaacagagaggagacatgagattgcgattcattcgtatcgcctataggtgtgagatggtatcgcttccttaaactctcgcctcttctaaaatttttccatgatttatgttattgtctgcccaaagtctagtttcatccgttcaaacaatgaattcttttattaaaatgcactctcacacgcaggaattattatactacaatttatcttatttttcgtcattatcatacaatctgccctaagaatgcaaggaaaaacctttttatatctaaaaagcacagccgctatgtaaaaaaaagctgataacgattgtcatcagcttttttactataattattcgccttcttcgtcaaggaatgtattaaccatttcctcaaccatgtcccactcttcttctgtttcaatcggttgtagctcaccgtcttgaccatcttcacttggtgtgaaagcagatgcatgaatttcaatttcctcttcatcatcttggtctgctccgattggatagtaaattacatatgatttgttatattgatcagaatcaaatgtgaataaaatttcgcatagctgctcatttccattctcatcgacgattgtaattttattttcttctacgctcatgtttgcacctcattttatattgtaagctcttagcttaactttttcttcagtgaaaagcaagccgttcagttatttcacttcccttttacgtacaaaagaatatgcaaaagggaaattcataacttttcagctgaggcaaagcctgctgcttttcttactgcttgctgtctaagtatccttgaagaatcataacagctgccattttatcgattacttttttgcgtttcttgcggcttacatcggcagacagcagtactcgctctgctgccatcgtcgacaaacgctcgtcccacatcatcgtttcaatgttaagtttttctttgacgttgtcagcaaactcaatgcacgcttcgcctcgagggccaatcgtaccattcatatttttaggaagacccactacaattttctctacggaatattcgtcaattagctgctgtaaacgaggatatgattgctccatctgctcatctgcaattttaattgtttcaattccttgcgctgtccatcccatttcatcactaactgccacaccaattgttttggttcctacatctaatcctaatacgcgcatttatgaatcctttcgatgctgttgtaaataagatttaacaagttcttcaatgagctcgtctcgctctaactggcgaattgtgtttctcgcatcgttatgacgaggaatgtaagcagggtctcctgataacaaatacccaacgatttggttgatcgggttgtagcctttttcttgcagtgcgtcataaaccgtaaacaatacttcatgtacgtttgtttcagctggctcatcttgaaaattaaattgcatggttttatcaaatgaactcacggtcccacctcactctcttaatttgtgaacacattgtgcactatgctaagtcttatttatattgtacaccaagaaagaggagaattaaacggatttaacccattcttctacagtgccaagtgctttttcaatttggctagcatcttttcctccagcttgcgccatgtcagggcgtccgcctccgcctccgccgcaaatcgtcgctacttctttaacaagtttgccagcatgatggcctttagcaattaaatcttttgttacacctgcaataatatttaccttttcaccttgtggagaagctaatacgattacagcggattctaatttttgttttaaatcgtcaaccattgcacgaaggttattcatatccgttgcattcactttcgctgctagtacattcacaccattaatgttttgcacacggtcaacgagattgccagcttcaatattgccaagctttgtagatagtgaatcattttcacgctgaagattacgaatttcttctagtaatccttcaacgcgccctactaaatcacgcgggttggattttacttttgccgcagcttcttttagtaagcctacttgatcgttcattaactgataggcagcttttccagttacagcttcaatgcgtcgagtacctgcaccgattcccgattctgatacaattttaaataaaccgataacagacgtatttggcacgtgacatccaccacataattctaagctgtagtcgcctacttgtactacgcgcacgatatctccgtatttctcaccgaatagcgccattgcacccatcgcttttgcttcgtcaattgctttgttttcaatttgtacagagatactgtcccaaatcttttcattaacgatttgttcaattttctcgagctcttcttgtgtcacttgaccaaagtgagagaagtcaaagcgcaagcgatccgctgttactaaagaacccgcttgattaacatgcgttcctaacgtatcttttaatgcttgatgcaataaatgcgttgccgtatggtttttcacaatcgcactgcggttttcttcatcaagcgtcgccgtatatgtttcaccttttacaagctcaccgtgtgttacagctaccgtttggacattttggccgtttggcgctttttgaacgtcttttacttccgctgttcctgcagcactttggatcgtaccttggtccgcaatttgaccgccgctttctgcatagaatggcgtgtggcttaagatgacttgcgcttctgttccagcttcagcgcggtcaacaagctcaccgtctacaataattgcttcaacaactgtttctacttcatttttatcatagccaacaaactcacttgcaacggttacttcaccaagtacgccgccttgaacttgcatagaactagaatcttgacgagcagcacgcgcacgctcacgctgtgcttccatttcacgttcaaaacctgcatgatcaattttcatgttctcatcttctgcatattcttccgttaattcaacagggaatccatacgtgtcatataaacggaaaacatcttccccttgtaccgtatcactgttttgcgctttttcttttttaataacggttgccaaaatagctagtccgtcatttaacgtttcgtgaaaacgctcttcttcattttttactacgcgctggataaaatccgtttttccctttacttccggatagaaatcaaccatgatttcacctactaccggcactagctcgtacatgaacggacgattaatgtttaactttttagcatagcgaactgctcggcgtaacaaacggcgcagcacatacccacggccttcatttgaaggaagcgcgccatcacctacagcaaatgttaccgtacgaatatggtcagcaatgactttaaatgccgtatcttgctcatcatttgtacgatatttagcgcctgaaatgttttctgttgcttcaataatcggcataaacaaatctgtatcaaagtttgtttgcacgtcttgaataacagaaaccatacgctctaagcccattcccgtatcgatgtttttctttggaagcggcgtgtacgtgccatcaggattgtgattaaattgagaaaatacaaggttccaaatttctaaatagcgctcattttctccacctggatataattccggatcagttaggtcatttccatatgcttctccgcgatcataaaagatctctgtatttggaccactcggaccttctccgatatcccagaaattaccttccaaacgaatgatgcgctctttaggcacgcccattttttcattccaaatcttaaatgcttcttcatcttcagggtgaactgttacagatagcttatctgcgtcgaatccaatccatttatcgctcgttaagaattcccatgcccattggatggcttcttctttgaaataatcaccgatagagaaattaccaagcatttcaaaaaacgtatgatggcgagccgttttacctacgttttcgatatcgtttgtacgaatggatttttgtgcgttacaaatacgtggattttgaggaataacacgaccatcaaaatatttttttaatgtagctactccactgttaatccataataaagatggatcttcatgcgggactaaagatgcgcttggttctacatcatggcctttttctttaaagaaatctaaatacatttgacgaacttgtgctgacgtcagttttttcatgattggtcctcctttaatactcttcttatttatagacaaaaaaatgatgacataaaagcatctattttctctgtgtacaaaagcaattgctagttatttgcacacaaaaaaactctcatccctgtagcagggacgagagttgaactcgcggtaccaccctgattataaatgcctaaagcacttatcaccttcatagcgttaacgttgctgacacggcaggttttagcctgcactctggactagcgttcagctgctctttgtttagcgcttctttcagccaaggaagcccttctctaaaaaccagtgtgcaacgtactcgatccatcattgtgtttaaaatatgtagcgttttcttatggcgatattatgacaaattaaccgctctttgtcaatgtttgagcgtataagagcggatatgcaaaatagatattttaatgactgctaaaattggcacagccaaaatgagacccaatactcctccaaattctcctcctaaaaggagcgcaagcatgataaacaaaggatgaatatgaagactctttcctacgataagcggagacagcacatttccctctagaaattgcagcacaaagattataatgacaatggtaataaccaactttatcgagattgtggctgcaataatagccgctggaaccgcaccaataatcgggccaaaataaggaatgatattcgttacgccaataatgaagcctaaaagaagtgcataaggtacatgaaagaaccacagtgctgctgtggcaatcacaccaataatcagacaaacaaaaaattgccctctaatgtaattgccgagcgattcattcacatccgataaaaaacgttcgcctggtttgtgccactttttaggcgtgacataagctgttgctttcttaatagaggaaaaatccttcagcatataaaaaacaataaatggaataatgattaaaatcaaaaaagaagtaatcaatgactttaatccttcggccacttttgtaagccacacgttgagcgtagcctctacatcatcaatgctgccttcaattttctcatgtacaccgtttggaagtgaagttgtacgatcatgaatcgattctacccaatgtctatatgtattcgtaaaatgaggcagctgttcgtttaaatcttttacttgttccacaaaaatagggtacgacttataggctccaaacccaattcctccaaaaaagatgatgtagatcagtaaaatagctagaggacgaggcacgcctttatcatgcgttttttcaataagcggatgaagtaaatatgtaatgaatgctgcaataaaaaaaggcagcagtgcttttaaaaacatgtaaataacaggaagccataaaaactggactttaaaaaagactaatatgcacagcagcgctaataacagcagtccgaatctatagaaccatttgaatgaactatctttcaacgtaaactcctcctctcttctattttttgataaagaaaggagtttatacatgctgttgtctcttctgcctgcaaaaaagcactattgcagctcagtgcaatagtgcttttttattagtgaatagctttcatcatacgtttacgcatttttttcatatttctttttgtaaacatctctcgatcatctgccattttaaatgcataagctccaagaccgaaagcgactactgacggaatgattctgcccattgctcttcctcccggtaaaaaagaattagaaattaattgtgcgctcgtcgtctgagaacaaatcatcaagcgagctcaatgttccatcttcttctacttggtgagtattaatttgtccttttgaaatagtcatttcaataaaacaattccagcagtaatactgatttacaccaattttgccaacgtcaatacttttacagtttggacatttaaacaaagtcgacacctctttatacgttctacttatataaacgcattatgtccacttctttccatgtccatactttattttctgacaattagcaaagaaggatggcaacaaaggagtttatttaactctttgttagcatacgaaaggttacatgaaatcatacggcgtaacgttttccatcccaatatttgcatctttcataaatggaatttcgggatcttctatgtcgttatccaagctttctcgaagcaacggctgtaaattcgtttgtcggatgctgtcttcatttcggctgacgccaagctgaaacgcttcgtcttcgccgcataaaattaaaaactgtttgcttcgcgtaacagcggtataaagtaaattgcgtcgcagcatccggtaatagcttttaacaattggaagcacaacaatgggaaattcacttccctgtgatttatgaatggaacagcagtatgcatgagttatttgattaaagtcttgctttgtgtaagttacttcatttccttcatatgaaataaccagcatatcctgtttttccgtattttctttggcaaagaaaaccgagacgatttctcccatatctccgttaaatacgttgctatccggctgatttacaagctgcagcactttatctcccactcggtacgtgatatctccgtgcttaagctctcttctttgctcggaagccgggttgaataattcctgaagaacttcattcagcttatcaatacctgcaggacctttatacataggagctagaacttgaatatctttagccgtatagcctttttttaacgcattcccgcaaacttgttgcacgacgttcgtgatgtgctgtccttgacaacgaataaaagaacgatctccttgctgccttgataagtcttccggaagctttcctttttttatttcatgagccaaatcaataattgacgatccttccgcttgccggtatacatctgtaagacggacggtaggaactacttctgaactcagtaaatcttttaacacctgtcccggacctactgaaggaagctggtcttcgtctccaactaaaataacctgtaaattagcaggaagagatttaaacagctgatgagcaagccacaaatctaccattgatacttcatccacaatcagtaattttccgtcaattggattttcctcattatgatcaaatccttcttgtccgttccattttaataatctgtgaatggtaactgctggaagtcccgtcgcttcgctcattcgtttagcagcgcgtccagtaggtgccacaagtaaaacaggaaaagcttcatcttttttataatcccctggatttaacgaacatccgtgaagttctgcatagagttcgactattcctttaataaccgttgttttccctgtacctggtccacctgttaagagaagcatcggagacattaaagcggtttgtatgcccttgcgctgagaaggtgcatattgcacgtctaatcgctcttctagttcacccagtgccaataagaattctgattctggaaactgctcttcgtactgcgtttgagccataattttttgaatagctttaaccagccctttttcagcatagaaaaggggaggaaaataaattttttcgtcttgaatgataagctttttgtctgcttttaatgcgtccacttctcttgtaagatccatttcagacagattctcatgcctgctttttcgaagaagctctgctgtttttccatacagctgatctgccgtgacgtatacatgtcccatttgattgcattcttgctcaatgacatataaaatacctgcacgcaaacgatcaggatgattggttgccataccaagcctctttccaagttcatcggccctgctaaagccaataccctgaatatcttctacgagctgataaggattattttgaacaatttcaagcgcttcttgtttgtacgcttggaaaatcttcatcgaaagctgcggtccaaatccaaggtctgtcagctttaccattacttcttctaacccttgatgttcacgaagctgcgtgactaaagcttctgccttgtcggctgaaagcctcggaacctcttttagcacagactcattttgcaaaatacgaaaaatagcgcgttctcctagagcgtccacaatgttttcagcagtttttttaccgattccgtgaaataaatcgctagacaggtactgaacaaccccttgccttgattgcggaagttcttttttaaactgttcaacatgaaactgcagaccaaactttggatgctctttgaagtctccgtaaaacgtgtatacttcatcttcattcagcttaggaaaataacctgtgacgaccgtttctttatcttcaatctctaaatttgtttttttgatccgtatccgcgtaacgttatataagttttcttcgttatgaaagacggttacaatcgacgtgccgcttatataatgacgttctggctgtgaagggttcacttgttcttcgttcatgttatccttcctttacccgctttcttaatgttctaatgtagacagaacttgtttggcatttgctgccattacgtgatctggctgcacgtttaaagcttcatctaacatctcaatcgccttgtctttgtcatctttcatggcatacgctacgcctaaattataaaaagcatcggcatgttctggctcttgattgactaccttaaggaattcagcaattgcttcatctaccatttcgagctgtgctaaacaaagaccgtactgaaattttgcttctacatcatgttcgtttagttctaccgcccgctgaagataaggcatcgcgaaacgaatttcttccatatgaaacagcgttaaaccaagcataaagtacgcatcggatgaatctaagccttttttgattgctaaatcaaagtagtgctttgcctgttcaagctgctctgcattaaaataaatatttcctgctccgtaatacgctgttgccgtttcttcatctaattcaatcgcacgttcataaaatttcaaagcacgatccatctcactaacagccgctaacaaattgccaaaattcacatacacaattggatcttttggattatcttcaattgcttctgaaaatgttttagcagcctcttcaaatttcccttcctgcatatactgaattcctagctgatttttatctgtcattttttcgttcactccactgttttagttatgatttaagagattttcacatcatgaaaatctagaatatgtaagttattagtttacccaataagtaaagtatatcatagaaaaacctcagctatatacggccgaggtttttcgttcttgcttatatgaattatacgtaccagatttgctcttcttcttgaaatactttgtcaattgttgctccgccaagacattcatcatctttgtaaaacacaactgcttgacctggcgtaattgcgcgaacaggttcagcaaaaataaccttaattgtattatcatcgactttttcaacggttactgctgaatcagtttgacgatagcggaattttgctgtgcacgtcattggtgacgaccagtcacgttcgcttacccagctgacattggttgctgtgagagatgtagaatagagcagctcattgtgaaagccttgatcgacgtacaaaacatttttttctaaatcttttccgactacaaaccaaggttcaccgctgcctccaatacctaaaccatggcgttggccaattgtatagtacatgagaccgtcgtgcttgccttttacttcgccgtcaagcgtttgcattacacctggctgagcaggaagatactgacttaaaaattctttgaagttgcgttcaccaataaagcaaatacctgtgctgtcttttttcgttgctgtagcaaggcctgcttctttcgcaatttcacgcacttttgatttctcaatttcaccaatcgggaacattacttttgaaagctgatcttgtcctaattgatttaagaaatacgtttgatctttatttccatctacgcctcgaagcattttatactccccgtcgcggtacgcaacgcgtgcataatgtcctgtcgctagataatctgctcctagcgtcattgcatgctctaaaaaggctttgaatttaatttctttattacacattacatcaggattcggtgtacgacctgctttatattcatctaaaaagtaggtaaatactttatcccaatattgtttttcaaagttgactgcatagtagggaataccaatttgattacatacgcgaataacatcgttataatcttcagtcgcagtacaaacgccgttttcatccgtatcgtcccagtttttcataaagattccgatcacatcgtatccttgttgttttaataaaagagctgctacggatgaatcaacgcctccgctcattccgactactacacgtgtatctttaggtgattttgtcaacttcgccacctccgttttcttcattttaattaaattgttcgctaaaaagcgaaagaaacgacacaaaccatcagtgagggatgaagaccctactgatggctgctatttacatcgttagtcgcttaacgatgtttgctgtttgacgtgcggttttttcaatttgctcagctgtgtttcctaagccaaagctaaatcgaatagaagttgttaaacgttcagacccttttccaaacatagctacaagcacatgagaaggatcgattgctcccgctgtgcaagctgaaccgcttgatgccgcaattcctgctaagtctaaattcacgagcatcgattcaacatttgtttttggaaatgataaatttaacacatgtggcagagaattttcaagatgtccgttaatttcaaaggaaataccttcttctttcaacacagctaccattatttctttgtatcttctatattcatctgcacgtgtttgcagcgtttgttgcgaaattttcacagcctcttcaaacccgacaatacttgtcatgttctcagttccagctcgtcgtttgcgctcttgttctcctccaaatagcaaaggagacagtgaaacgtgagcagctgcatataaaaagcccatcccttttggtccgttaattttatgagccgaaacggataaaagatcgacacctaattgttgcacatttaacggaattaatccataagcttgcactgcatccgtgtggaaatatgctccatgctcttttaatagaactccaatttccccaattggctgaatagcacctacttcattatttccaaacatcaccgacacaagaattgtttgatcggttagggctgattttatttcatctacagatacttgtccgtactcattaactggtaagtaagtcacttcaaagccctgtgtttctaaatattcacacgtatgaagcacagcgtggtgttcaatttgcgtggtaataatatgatttcctttatggcggtttgcaagagctactccgatcagtgccatattatctgcttctgtcccaccacttgtaaaaatcagttcattttcgtgtgctccaatacttgctgcaatcgcttggcgagcttcgtctaaatagcgtcgactttcccgcccatagtgatgaatactagacggatttccaaagtactcatgcataaatgtcgtcattttctcaacgactgctggatgtattggagacgttgctgcatgatcaacataaatacgttccaaaataaacgcctcctagctcattattaaatataaaacatataagacgcttgatcatcatcagaatgatttgctaaatcttcaagcgttgtactatctagcacttctttaaccgcatctcgaatacgaatccacagctcgcgttttgcaggctcttcatcttcaattccttctacaggactaataggaccttctaaaacagaaataatatcaccagaagtaatgttagcaggttcatgggctaagatgtaaccgccataagctccgcgcacgctttttacaagcccagcgttacgcagcggtgaaataagctgctctaaataatgttcagataagtcatgcgtttgagcaatagttttaagcgagataggaccttcgccaaagcgcttcgcaagctcaatcataatcgttaaaccgtagcgtccttttgttgaaattttcatacgatacactccttcaatacactttttttatttatgaaaaaaataagaccctcacgttgtcactgaatgctgtgatgagtcgttttttactaagctatatgaacttctctatatgcatttcttgcaaatgtaactgttgatattataacatactatgcctataagataaatttccaccacctattcaccgcttgtgatacagtgaaagaaaagaaaggagaaaaacatggctacaaaacctctcgcatttcgaatgcgtccgactcatttagatgacgttatcggacagcagcatttagttggcaaagataaaatgatttatcgaatggtaaaagcaaatcacttaagctcgatgattttatatggacctccaggcgttggaaaaacaacaattgccacagctattgcaaaaacaaccaacacggcgtttcgtcagttaaatgccgttgtaaacaataaaaaagatatggaaattgtcgccgaagaagccaaaatgtcaggcaaagtaattctgctgttagatgaagttcatcggcttgacaaagctaagcaagactttttgcttccttacttagaaaacggcatgatcattctaatcggagcgacaacaagcaatccttatcacgcaattaatcctgctattcgaagcagatgccaaatcttcgaattaaaatctcttacgccagatgatatcaaaatggcgctaacaagggcgctcaacgatccatcaaacggatttggggatagaaaaatcatcgtagaagatgacgccatgaaccactttgccaatagctgtaacggtgacgtgcgctcggctttgaatgctctggaactggctgttttatcaacaggtgaaagcgatggtaaaatcgttattaccttacaaacagcagaagaatgtctgcagcaaaaatatttttcacatgataaaaatggtgacgctcactatgatgtattatcggcttttcaaaaatcgattcgcggcagcgacgtaaatgccgctcttcattatttgggacggctaattgaagcaggagacttgatcagcatcaatcgtcgccttttagtcattgcgtatgaagacattggactagctgatccggatgccggcatgagaactctcgcagctattcaagcaactgagcgattaggactcccagaagcacgtatcccgcttgcaaacgccgttattgagctttgtctatcaccgaagtccaacgctgcttacaaagcattagatgaagcgataagcgatattaaaaaagggttttccggcgacgttccccctcatttgaaggatgctcattacaaaggagcagagaatcttggccgaggcgttgaatatcaatacccgcatgattttgataacggatgggtccttcaacagtatttaccggatcgcatcaaaaacaaacaatattttcatcctaaacaaaatggacaagaaaaatacttttcaaaagttttcaatcgtttagagacattaaaaaaagaaaatggctgaaactgttgctcagtttcaaagccattttcttttttgtctttatctattaagctgcacttttaacttctttgcgttttttcgtttttgttgaacctttaaagtagctgtctaaaagtttagcgactaaacgagcgattatgttaaacaacagaaccataatgattagaatagcagctgactttgttgcaatcaatcttgcatcaggtacgattccttcagagtttaatttccaaatgtgaacggcaagcgtctctgctggtcgaaaaatattaaacgggtttacaggactcgttaagtcagcatttgaatttaacatcggcgtggttaagccagccgtataaatcaacgcagctgcctctccaaagattcgtcccgctgttaaaataacgcctgtgataatttgttgaatcgctgatggaatgacgactttgacaattgtttgccatttagtcgcacccaaccctaaactcgcttcttttacactcgcaggaacagatgcaatcgcactttcacatacgcgcgttaaacccggtaaatttaaaattgtaatcacaagtgctccaccgataagcgtatagccccagcctgaaaatgtgacaaaaattaataatccaaataaaccaactacaatggacggtaatgacgccattgtttcaatacataagcggacgaaatttaagaaacgaccttgcttcgcgtactccgctaagtaaattccggctcctaaaccaagaggaatagaaatgatcagcgttaaaacaagcatgtagaacgagttaaacagctgaggtccgataccgcctcccgccatcgtattgcttggctttccaaataaaaagttcgggtcccaaaacccccagcctttagcgataatttcaacaactaaatacactaatagcaacacaactagagcggcaatgccataaaaaatacctgtccatatattatttactgtgcgtgcatttttgtttctcattgatgagcacctcgtttcccaattgctcggataattaaaatgaacacgaaagaaataagcagtaaaatcatagctaacgtccacaatgcgttattccatgccgttccgtttaacgtattagacatatccattgttaaaatacctgttaatgttgccgttggactatataagctttcaggaagcttaaccgtgtttccgataaccatttgaacagctagcgcttctccgaatgcgcgggcaagtcctaacacgatacctgttaaaatacctgttttagcagatggaataatgactcggctaattgcctgccatcttgttgaacctagtccataagaagcttctaaatattcaggtgctacgcttcgaattgcatcgtcagcaatacttgcaattgtcggaagaatcatgacgcttaagacaataattccggcaatcaaactaaagcccactccgccgaagttatcgcgaagaagcggtactaaaatggtaacccctaaaaggccgtataccactgaaggaactccgactaaaagttctaaaaccggtcgtaaaaccgttgaaccaaatttaggcgaaatatagttgttaaaaatggcgatagcaattccaattggagcacttataatcacggctccgattgatacaagcatggaacccagaataaacacaagtgccccgtattctttattgtttgggctccattttgttgaagtcaacatttcaccgattgatatattactttgtaaaaatgactgtatgcctttttcacaaataaatacgataatagctaacgtaacaagtacaattagaataccgcaaaatgtagaaagcgtacggccaatgtattcgctttttacataattaatggattttttccccttcatcgctctgtctccttacatattcagtatatattcgcttttctttttattcgctatatactttattaacattcaaatagaataagactgactgtgttagtcagccctattctttttaaaaacactcttattttttgaactcagtcattgggatatatcccatatcttctacttgcttagcaaagtccttaccagctacgtagtcaatgtactcttttgcaccatcttttggctcaccgtttgtaatcatgtactcataagaccaaaacggatattttttagaaacaatgttttctgttgttggctctacaccatcaatattaagcatttttaaactttcttttttatcgccaattaaatacgacatagcaaggtaacttactgctcctggcgttgagtttactgattgctcaaccgctccgtttgaatcttgagctgtaccaacgctgtcatttacttttgcgtcacccattaatgttttctcgaatgtagcacgtgtaccagatgatgctggacggttgattacgttaattttctcgtcgtttccgccaacttctttccagtttttaatttcaccagagaaaatcttttgaatttgctcttttgttaacgattctacttttacatctttatttacaacaagtgcgaacccaatacccgctactttcgtatctacaagtttatctgcttttgatttatcttcgattttatcggctgctggaacatcagagtttccaatgtcaactgctcctgatgctacttggttaacacccgttccactacctccaccttgtaccgttactgaaaggtttggatatttttcagtaattccattcgctgcttcttctgcaagtggttgtaaagctgtagatcccgctgctgttaacgtacctgacacttcttctttgctgcccgaaccactgtcgttgcttgctccgtctttaccacatgctgctagtgctcctaccattaaaaaagctgctaatgttactttaaaaccctttgttttcattacattaccctccaataaatatatgtgtaattagtactagtcctttgtactcgaacaacaggtacaagacacattatacgagtagattgttgtctttatatgaagtgaattttaagttactgtaaacttacttatttggggtttattttttcttatttctattaaaacccttgagatataagactttctggatattactgtagaagatacaaaagaaagaaagccaaaacgtaaattttatgtaaataaagcgttaaataaatttacataaatctcttttttttaatacagtgtaaattcatcatcaatccatatttttcaatttattagtactttttatacatatcaaacagaagattccatccaaagcataaatagaacagatatttccataaaaaaaagaaggctacgatagccttctttttattgatcacctacgcggcgaatcttaatatcacttaataattcattgataacatgaccgcccataattaatcctgctacagatggaacaaaagcattagaagatgggggcattttcgcttttcgaatttgcgcttgatcgtttcctacttctttgcgaacttcttcgcgaataacgattggacgttcatcagaaaaaacgacgttaattcctttgcgaattccttctttacgcagacgagtacgaaccacttttgcaatcggatctgtatgtgtctttgaaatgtctgcaattttgaaacgtgttggatccattttattcgcagcacccatacttgaaataatcggaatatcacgttttaaacattctttcattaaatgaattttatacgaaatcgtatcggatgcatccactacgaagtccggttcgtaactaaagaactcttcatacgtttcttccgtataaaacatttgaagagaaacgacgtcacagtctgggttaatatccaaaatacgttttttcattaattctgtcttgggctgacctaccgtagaaagcagcgcgtgaatttgacgatttacgtttgtaatatcaacatcgtctttatctacaagaattaaacgccctactcctgacctagccaaagcctcagcagaaaacgaccctactcctcctatccctaaaatagcaactgtgctgccttttaaagtagctagcccttcttttcctatcgccagttcattacgcgaaaactgatgcaacatgttaaaacactcctctattaaatacactaacgtatatgaataattcaaataaacaacgaaattgactataccatatttttagcaaaacgaacatgagcattcgttatttatccataaaaaaactctatgcaaataattacatagaggattttttatatgtatgctagtcccgatcgtgccgtctcgagtgccttcgttttgaacccgctctcggcaggtgggtgctctgctttaaccattgtaagtcctcgagatgaggcatgtacgctcgttaaaaactccgagctcccaagcaaaaaattgttcggtcaaaactggattaaggacgaacacatcaggactatttagttcttgaaagtatcttatcacagaaaaaatcactttgcaattaataagtaaaacaaaaaaatcgagcctgtcactggaacgtgacaagctcgatttaacagacggttcaatcgattacgcttctgttttttgcttttttacctgcaaatgcagctcgtctaattgcgcttcacttacttcaccaggtgcatttgttaatagacagcttgcacttgctgttttagggaaggcaattgtatcacgcaagtttgtgcgtcctgctagaagcataactaaacggtcaagacctaacgcaattccgccgtgaggaggagtaccgtattcaaatgcttcaagtaagaaaccaaactgctcatatgcttcttctaatgtaaatccaagcgttttaaacattttttcttgaatatcacgctcgtaaatacgtaaagatcctccgccaagttcgtagccattcaatactaagtcatatgcttgtgcacggacttgtccaggatcgctttctaacattggtaaatcttcacgaactggcattgtgaatggatgatgagccgcgtagtaacggttgtcttcttcgtcatgctcaagaagaggccaatctgttacccataggaagttaaatttcgtttcatcaataattccttgttcttttgcaagctttaggcgaagagcgccaagtgcatctgctacaactgactttttatcagctacaaataaaagtaaatccccttcttccgtttgaagagcttccgcaaattgcttttgctcatcttcattgaagaattttgcaatcggtccttttaagccgtcagcttcaactttcagccatgctaaccctttagcaccgtaaattttcacgaactctgttagagcatcgatatctttacgtgaatagctagaagcggcaccttttacgttaatggcttttacttctccgccgttttcaactgctgcgctaaatactttgaacccgcagtctttcacaagctctgataagttgactagctccatttcaaaacgtgtatccggcttatctgaaccgtagcgactcatcgcttcatcatatgacatgcgcgggaaaggcgtcgttatatctaaatcttttacgcgcttcattactttagacatcatttcttccgtcattgtcatgatgtcctcttgagataaaaatgatgtttcaatatcgatttgagtaaattcaggctgacgatctgcacgcaagtcttcatcacggaagcagcgagcgatttgataataacgctcaactccgcttaccattagcagctgcttgaagatttgcggtgattgaggaagagcataaaactccccttcgtgcacgcggcttggtacaagataatcacgtgcgccttctggcgtacttttcgttaaaataggtgtttcaacatctaaaaagtcattttgatctaagaagtcacgaattgtttttgtaatgtcattgcgcattttaagcgtgttaaacatctcagaacgtcgaagatctaaataacgatattttaatcgaacatcttctgatacttccgtttgatccgcaatagcaaaaggaggtgttttggctttgtttaataccgtaatctgctcagcgtgaacttcaattttacctgtttttaagttcgggttaacggttccctcttcacgagctacaacagttccttgcacttccagtacgaattcattacgtacatcttcagcaatttttagcgcttcagcagatttttcaggattaaatacaacctgtacaactccgccgcggtcgcgtaaatcaataaagattaatccccctaaatcacggcgtttttgaacccatccttttaatagaactgtttcgccagttgcttgttctgttacatcaccacagtagtatgaacgttttgtcatcatggttcccccttatacttgttcttgcaaatagctgaccaattgatcaattgatacttcttgctgttcgccagattccatattctttacgtttacaacttgttttgctagctcatcttcacctagaacaacaacaaattttgcttgtacacgatcagctgctttaaactgagctttcatttttttatcttgataatctttatcggctacaaagcctgcacgtcgaagcgtatttacaattgaaacggatttttcttttgcttcatcgcccatagttactacatagcaatctacgcctgtttctaccggaagctcaattccttctgcttccaatgcagataataagcgttcgatacttaaagcgaatccgatacccggtgtttcaggtccgccgatttcttgaatcagcccattataacggcctccgccacaaagagttgtaatggcgccaaatccttctgcttcactcattagttcaaatgctgtgtgattataataatctaacccgcgtactagcgtcggatctacaacatagtcaatgtctaaatcggttaagtactgctgtactttttcaaaatattcttttgaatagtcatttaaataatcaagaatagacggcgctgtagccatcagttcatggtcccgatcttttttacagtctaaaatacgaagaggatttttctccaatctgctttggcagtcgctgcaaaactctccaatgcgaggtgcaaagtggtcaataagcgcttgacggtgagcttgacgactttctgtatctcctaaactgttaacaaccaactttaattttttcaatccaagcgattggtaaaaactcattaacagggcaagaacttcagcatcaatagctggatcatttacccctaatgcttctacaccaaactgaacgaattgacggaaacgtcccgcttgaggtcgttcatagcgaaacataggaccaatataaaacagctttgttggctgcgttggatttccaaacatcttatttgaaacaaatgatcgtccaactgcagctgttccttctggacgaagcgttaagctgcggtcacctcgatctttaaatgtgtacatttctttttgcacgatatctgttgtttctcccactccgcgcaaaaataattcagtgtgttcaaacattggtgtacgaatttcttggtagttgaacgcacggcagatttctcttgctcgctgttcaacaaactgccaatattctactttgcccggtaaaatatcttgtgtgcctctaggtatttgaactgacataacgtgatatgcctcctattttttaaatttacaatacaaaaaaactctcgcctctactatttttccatagtagggacgagagttaatctcacgtggtaccaccctaattgaaacatatgacatgtttccactcatttcgttaacgcacgaacacgttcatctcctactaagtttcccttttcagagtgaagcctcctgagtgttctttcataaagtcatcatgtagaaatgctttcagcctaagacatttcctctctagccatgtgtcatctttactacttttctcgatctttggcttatcaatataaaaatgttatacattcattttaatttagcaattgctttctatattacgaatgaaatgagcagttgtcaagcacctttcatgttaagagcggtctaattgttttcttagtttctgaatatctcgaagcgttaaaccaaattcagaagccaattcaagggatgaagcttcactttctctgtcaataaaatcatgaaaatgaatgccaaataccggatttacctgctgaaatgattgttcacctttttcactaaacttcatcgtttcttcctccctgcctacacttacttatccttttattagcattgcccagaaaagatgtttttacataagaaaaaggattttttttattttcatcgaatactctattttgttataaaaaggaggtctatctattcgccatctaaacatgaagtctgtatctgttttggctgcaagtatccttttattactgtgttcttcctcatttgagcgcccaaatgtaccggtccatcaacccattattgtaacagctgactctcttcatgtacgcagcggtccaggacgttcattttcaattacaaataaattgacgaagaatacaagactatccgtttcagaccgtcaaggagattggtattatgtagaaagctcggatattcaaggatgggtgtttaaaaaattcacgaaaaccgtagcgcttcgcagcgttcagcctagcatgcaggtagcgcagcgccagcctgtttatacgctgagtaaaagcttgcagcacttaaagggcaaaacaattattattgatgcaggccatggaggaaaagacaaaggagccatcggcacacagggcacatatgaaaaagacctcactcttcgaacagcacttattttacaaaacaaacttcaaaaagaaggcgcacacgtcattttaacccgcacccatgatgagtaccttctactttcacagcgcacgctgcaatcgactaaagcagatgcttttataagcattcactacaacagtacgaacagctcacagctaactggccttatgacgtattattaccatcagcatcaggacagtccactcacacattctattcatcagtcccttattaatcatgcaaaattaaaagacaaaggagaacgttttggaaactattatgttcttcgcgaaaatacacgtccgagtacattaattgaactaggctttttaagcaacgaacgggaagaaacgtatattaattccatcagttatcagcaaatgattacgtccgctatcgctgaaggattaaatcactactttcaaagcaaagaaaaaacgcagactcatctgtgagcctgcgttttttctttgctttctacaataagcgtgaccggtccgtcatttgtaaatgatacgtccatcatttcaccaaatgcgccggtttctactcgaacatttttttctgataatattttattaaaatagttgtaaagcgttacagcatgatctggcctagcagctcccataaagtttggtcttctgccttttcggcaatctccgtacagcgtaaattgagataccgataaaatttctccttctacatctagaagcgacaaattcattttgccagactcatcatcaaacactcgcaaattcacaattttatccgctacatactctgcatcagcttcagtatcgtcatgggtaatgcccactaaaagcatatatccgtgcttaatctcaccgaccgtctcacctgcaacagttacttttgcattctttgctctttgtacgactactctcatgtataacgacctttcttaatgcataattcggcgaactgaataaatgtctcgaagctgcttaatgcgctcaaccactttatgaaggtgactgatgttatgaatagaaattgacatatgaatcgtagccattttgtttcggtccgattttcctgaaacggctgaaatattcgttttagtctcgtttacaacctgcagaacttcatttagtaagcccctgcggtcgtatccggaaatttcaatttccacgttaaactctttgccttctttaatatgtgtttcccactctacaggaataaggcggctttcagcatcatctgtgtgaacgtttaaacaatctgctctatgaacagatactcctcgcccctttgtaataaaaccaacaatctcatctccaggaactggattacagcatttagacaagcgaatcagcatgttctctacacccggtacaataaccccggaatcttttcgtttatgctggcgaacacgcttggccgcagtgtcgcgtgcaatatcatcaatttggatctcttgttcttgatcgcgctgctttctccacttctcggttaaacgattagctacttgagccgcagttaatccgttatacccaatagctgcatacatatcatcttcgtttgagaaattaaacttctccgctactcgtttgatattatcagctgttaatacttcttttaagtcaaactccatttgacgaatttctttttcaaccagctctttgcctttttcaatattttcatcgcggctttgctttttaaagaattggcgaattttatttttggcttgagacgtttgagcaagctttaaccagtccttgcttggaccatacgaatgcttagatgtcaaaatttcgataatgtcccccgttttcaaacggtaatcaagcgtaaccatcttgccgttgacttttgctccaatagttttatttccgatttcagaatgaatacgataggaaaaatcaattggaacagaacccgaaggaagctcaatgacgtcgccttttggcgtaaaaatgtaaaccatgtcggaaaacaagtcaacttttagagattccataaattcttctgcatcgtttgcgtcattttgaaattctaaaatttctctaaaccacgtcaacttttcttcaaatgaagcatgctcagctgtttttccctctttgtaagcccaatgagcagcaattccatactcagcaatttggtgcatgtcaaacgttcgaatttgaacttctaacggatcaccttttggtccgataaccgtcgtatgaagagactggtacatattttgttttggcattgcaatataatctttgaaacgtcccggcattggcttccagcacgtgtgaataattcctaacaccgcatagcagtctttaatgctatttacaataatgcgcacagctagtaaatcgtaaatttcattaaactgcttgttttgcagtgccattttacgatagatggaataaatatgttttggacgtcctgaaatttcaactttaatcgacacttcatctacttgctctcgaacttcatcaataacttcagccaaatactgctcgcgttccgcacgctttttcttcatcaaatttacaatgcgataatattgctgaggatttaagtaacgtaaagctgtatcttcaagctcccacttaatttttgaaataccgagacgatgagcaagaggagcaaaaatttcaagcgtttcatttgaaatgcgtcgctgcttttcctgcggtaaatgctttagcgtacgcatgttatgaagacgatccgcaagtttgatcaatataactcgaatatcttgagccattgccacaaacatcttgcgatgattttcagcctgctgctcttctttagacttatatttaattttcccaagtttcgttacgccgtctactaacattgctacttcttcattaaaagctttttctaaatcctttagtgttatctctgtatcttcaaccacatcatgtagaaatccagctgcaattgttgctggatccatatctagatcaactaaaattcctgcgacttgaatcgggtggataatatatggttcacccgacttgcgatattgttctttgtgagcttcttttgcaaaatcatatgctttttgtacaaaagccacgtcttcttcatttaaatatcgcttcgtattgtcaatgacctgttccgctgttaggacttgctcatttgccatgaaatcaccttttatcaactagcatttttaattcatattgtaactattatcttgaaaaaatccaaggatgtaaagcctttgcgtctaatttatgaaatttacatcatttccattttacgtattaacgttttttaacgaaaaaagagcacctgtatcaggtactcttttttatgtgatcgttcttcttaatacgtcattaatgtgaatacatcgtaaccgtctagtttgtcacggccgtcaaggtaagaaagttcaattaagaacgcagctccaacaacaattccgcctaattcttcgacaagcttaatcgtcgcttcaattgtaccgcctgttgctaataaatcatctgtaatcaacacgcgctgacctggcttaattgcatctttgtgaatcgttaatacgtctttaccgtattctaaaccgtaatctactttgattacttcacgcggtaattttccttctttacgaacaggtgcaaagccgatacctagcgcgtatgctactggacaaccaacgataaatccgcgagcttccggtcctacgataatatcaacttgtttatcattggcatattttacaatctcatccgttgcggcacggtatgcgtcaccgttatccattaatgttgagatatctttaaatgtaatacctggttttggccagtcaggtacaattgtaatataatctttaaaattcattctaatgttgcctcctcattcaatcgaacgcttaaaaatatcttgaaagtgatttttaagctgtacatatgacgtataaataaagtttttttctatttcaatctgctgctgcttttggcgataagtcgcagattctattaaatcacgtttcgcagaatttttcactaacgaaattaagccattgtttattgtaacaaattctaactcaaaaaacacctttgccataaaatcaatcgtttctttcgaccagcccttatgaatcgctaaatcttctttgtagcgttttaaatcaaaaggaccctttttcgctaaaaagccatagaaccatttaaagtgatcgcgagttgggattgtatcaaaataatggtcttcttccgttaagaaaatagcgtatattctagaaggaataccttggaaaaacaaagcttcaagccacttctgtgaaggaggcaaatctaataaaacaatctgttcccctgcaaacatacatgcttttgcctgttcttcatcttgaataagaacaacatgctccatcggcagcatcgacttgtatttatcaattgttgaatcgtgaaaagcaacaactttcatttgatccgtgaatacctgctcaaagaaacgtttgacatcaatagcactgcgataatcaaacatctgccactcatctacagagatatcttctaccatcagctgcggtttgcgcatattgttccactcattaatagatagttcacctactaatgatactttagctataggagatacttcatctaatatatagcctaacccaaatcctactgcatcaaccgatacaccgctgtcttcaaataccagttttaaatgatttttattagcaccaattttccgcatagatgttgtatgaacatctttaatgagaacttttggcttcgggttatgcataccaaatggagcaagcgcactcatttgttcaatgttttccagcgtaatttcctctgttgtgcatactgtatcaactgatgtaattggaataaaatcctgttcggttaacacgttgcttgcttgttcattaagacgtgtgcgcagctcttctacatcatcgctgtttaacgtcatgccggctgccattggatgccctccaaaatgcggcaaaatgtcacggcatttagataagttcgcgaataagtcaaagccttcgatacttcttgctgaacctttggcaatacggttttcagagtcaatacttagtacaattgttggtctgtagaacttttctacgagcctagaagcgacaattccaacaacacctgcattccatccttctccctctacaataagaacgctgttttcatccggaggatacatattttcaacaaattcaacggcttcttccgtaatatcgtttacgatttgctgccttaccttgtttaacgcatcaatttctttagctaaaccttttgcttcttcagcatttgttgtcataagcaagtgaacagctggatcagcatcttgaagacgtcctactgcattaatgcgaggagccatagcaaatccaattgtatcttcagtaatttcttcgcgttttactccacatacgctcagcagcgcttcaattccagtgcgcttcgtgagcttgagatagtcaagacctttgcgagcaattaagcggttttcgtcgactaaaggaaccaagtcagcaatcgtcccaatcactgctagttctaacaaatgttccggaagctcccctaacagcgcatgagcgagtttaaaagccactcctacacccgccagttctttaaatggatatgtacttcccggcagctttggatgaataattgcatacgcatccggtaaaatcggacccggctcgtggtgatccgtaataattaaatcaaaatctaattcacgtgcatacgccgtttcttcgactgccgaaatacctgtgtctaccgtaatcaccagctgatagccgcctgcgtttattttatcaaatgctgccttattcggcccataaccttctgtaaagcgattaggaatataaaaatcagtatcagcgccgagctgctgtaaagcagataacataacagaagtactgctgacgccgtccgcatcgtaatctccatagatcataattttttcattatgatcaattgcttgctgaatacgagctaccgctttgtccatatcgtgcaataaaaacggatcgtggaacgtttgtgcatcaacgtgtaaaaactcacgtgccgcttctactgttgtcatgcctctattaagtaataacgaagctactagaggtgtaatattgaggttttctacaaattcattaacaagttgttcatcacattcttgaacattccaacgtttttttgactgtaacatgtctcttcaccccttaacccacattattatactagagtggatgaaatggagcaacgaaagaaaataagcatatttttctgacagtgcgccttgaattttcacaaacaaaaaaacgtgcgaacacttcgcacgtttttgaattacttgctttctacttctttttgttcctcgcgcttcaactgtttccctttccacacaagccatagctgagcagcaataaacacagatgaatatgcaccaagaattaaacctactaacagggcaattgagaagttttgaattgattcacttccgaatacaagaagtgctacaactgcaatcacaactgttaacacggtgttcattgaacgagtaaacgtttcacgcaagcttaaatttacgataaacgccaaatcgtcaaacgttttggatttgaatttctgcatattttcacgaatgcggtcaaacgtaacaatcgtatcgttaattgagtaaccaacaatcgtcaagacagcggcgataaacgttaaatctacctctagctttgttaagctaaagaccgtaacgataaaaaacgcatcatgcaacaaagcaagcacggctgcaagcgccatgtagaactcgaatcgaatcgttacatagatgataattccaattgaagcaattacaatcgccatcattgcatttttcgccagttcttttccaactgtcggcgaaacggtgcttacgtttggttcagaaccgtatttatctttaaagtgatcttttaagttggcaatttcttttttattcaagaccccaactacacgtacaacacccgtatcattactttttcctgtaatgactacgtcatccgttttgatatcaagagacttcatttcacgctgtatctcagcctgcgtaacggtatgatttgccggaatctctatgcgagttccgctcgtaaagtcaatacctaggttcagcctaaacacagcaaccgagataataccgataatgacgagcacgcttgagaatgtgaagaacgctttacggtatttaacaaagtcaattttatcccacactgtaggtaaaacggttgtgccgtcatctttgcttaaatcgtgaatttgctctttcttcacgccaaagtagcctggttttttatcaaaccagcggctgtttactaaaagactcattaataatcgcgtaccgtatacggccgtaataaaacttagcacaatcccgatcattaatgttgttgcaaatccttttactgaactttgaccataaaagaataatacaagagccgctaacatcgttgtaatattggcatcaaaaatggtcgcaagtgagcgacgatttcctgcccggtaggccgatataacagaccttcctgttttcagttcatctttaatccgctcgtacgtaatgatattcgcatctactgccatacctacaccgagaataagagccgcgatacctggaagcgtcataaccacatgcatcaagtcaaatacaagcaggtttaaatacacgtagaagctgagtgtaataatggcaataagccccggtaaacggtagaaaaacagcatgtaaaggaatataattccaattccaataatacccgctaatatagtcgtgtgaagagcttcttccccaaactgcgctccaacggatgtagagtatagctcatctaatttaaccggcaacgacccggcatttagcaattccgccagctgcgttgcacttttcactgtgaagttgccacctgaaatctcaacatctggctgtgttaacacgctgctaacagaggctgcagacaggtacttcggattttgttttgtcgcttctttttggtacgagtcttttccttcttcatagtccagccaaatgacaattaaattgttaggtgctggtttttgagaaagctctcgcgtgatcttttcaaattttttcgcattttttaactttagtgagacgctaggctgattgctttggtcaaacgattgctttgctccgccttgcgctaagtctgtaccatccatcagcaccttatcgttcacgtcacggaacgttaagtttgcttgagttgataacagatccctggcttgcttttgattcgtgacaccagctagctgaacgcggatgcggtcgtttccttcaatttgaatgctgggctcactaactcccagtacatcgacacgttgacgcagcgcttcaaccgtgctgttaagtgcctttttgtcaatgacatcgccttttttagctggactgactttatataaaatttcaaatccaccttgaaggtcgaggccaagtttaatatcttttgtaattccagtcatcgttgttccgattgtactaaacacaagcagtactaagaggaaaaaggcaacgatacgtcctcttttaaccatcgacagaaaatcctccttcttatgtaaaaaacatgaaatgataacaatagataaatgaccaatctaattatcattcataacctaatgtctgtcaaataaagaccttatcaaattttaatacatgtattttacaaactctactttaataattctttccagtcttctccattattaacacttgagaacatatcagatttataagattcaattgttacatagctcatcacctgcgtgatcttaacagataaaatatcatttaccacttgatggagagatagctctctttcttttttccattttttcatttctaaataacccaataaatcgttctccgttacttcttcatatccaagcatatgaaattcttccattttgctggataagacaggctgtataagttctttcgaagctgaaataaatggatgtgtcatatcgatcctccttcctgtttgacattttgcgtaaaatttctttctcgtatgaggaatacttgtcatgcttggacaccgacggcgcatatattcactgtataaacctcaagaaagcagtgagtatatgtctaaatttttacagggaactattattttaataattgctggcttaattacacgtgtactcgggtttgtcaatcgaattgtggtggctcgaatgattggagacgaaggtgtgggactttatatgatggcggtccccacgctggtattagtaatcaccttaacacagcttgggctaccggttgccatatccaagttagtggcagaagcagaagctttaggtgacaggcataaaataaaaaaaatacttgtcgtctctttaagcattacgtgtacgcttagcgttttatttacgctcggattaatattattcgctcccgttgtagcaaaaaccttctttacagattcacgtacgatctatccgctgctggcgattattcctgttattccaatcatcgccgtttcgtctgtcatccgcggatattttcaaggaaagcagcaaatgaagcctgctgcttattctcaaattatcgaacaagtggtgcgcattacgttaattgccgtatgtacaaaagcatttttgccctatggaattgagtacgctgcggctggtgctatgctatcttccgtatttggagaactagcttcactgttttacatgatgtttatgttcaagcgaaagaagaaaataacggtaagacgaaaattttttgcttctttacatgcgggcaaagatacgttctttgacttaatgggaattgctcttcccacgacaggaagccgcatgattgggtcaatttcttggtttttagaaccgattgtagtagctcaaagtttagcaattgcaggagtagcgacagctgtagcaacgaagcagtacggagaattaacaggctttgcactccctctcctgatgctgccttcttttgtaacggtgtctctatccacgtctttggttcccgcaatcagtgaatctcttgcacagaatcaaatgaagcaaatcgaatatcgacttcatcaagctctccgcttgtcgtttgtaacaggcgggctagccgttgttgttctttatgtatttgctaatccggtaatggaattgatgtatggttctgacaaagctgctatttttgtcaaagtaatggcgcctttttttatcttttattactttcaagggccgcttcaagctgttctgcaggcgctagaccttgcaaaagccgccatgattaacagttttataggagcagcggtcaaaacatctcttatcttcttactcgcaactcagccaaatctaggcattatgggagctggtcttgcaattgttgtgggaatgatgcttgtcactcttttacacctgtctaccgtcatgaaaaaaatcacgtataagattcatgtgtttgagtatcttcgcagtttttctgtaatggggatatcaggttttaccggacacttcgcttatatgaaccttttcacttccatccctttgagcttacgaaccgttttatcgattgcacttacaagcattgtatacgtactgtttttgctgctttttagactgataacaaaagaagaattaaaccgtttttctgttttacgctattttaaacgaaaataaaacgcggagcaatccgcgttttattgtttcacatctaccaaatctataaaaaattttccgttgtcatagctgcaatatgaaaccttatctaagtttgaataccctagcttttccagctctgtctttaaccattccgtcgttttatgttcatgtagcagatgctcttcttgaataatgccatcaatgataaaaggcaaattcaaattgccttttttgcctgattgctgatctttctcaaacacggacagccttcctgaagattctaaaatagcaaattcaacatcagctacattttttatatttttatcacgcagctgcacgagcaagtcattgaagttatatcgctgccttttcatttcatgttcgtttatttttccattttcaatgataatactaggtttgccatcaataaaatttcgcattcgattgcttttaagagaccatatagctaagccgatttgaataataagaagcgttaacatcggaagaattgaatacagcaaaggatcttttgggttttcaatagccattactgccatttcagcaatcataataaagacaactaaatccaaaatgctcagctctcctatttcccttttacccatgacgcgaaaaataattaaaactactacgtataaaagcacggttcgcgcaaccatgatcaatagttccactgcaaagacctcctttatgtattcccttgtagtttgtaccatttattttaaaatagccttacttttatgcgtctattttgaagtcatcccgaatatgctcgtactaagggttcacctatctttttatttcatgggggggaaacaagttgggtgcaaaacgaatgagcaatgctgtatttgcaggagtagcaacaatcttagtgatggctttagcgattagcattatcttttcgcttattttaaaatttacatcgcttgaagaacagtcggtccgtttatttttacttattctctcatttattacactgtttatcggaggatttatcgcgggaggacgaaacggttcaaaaggacttctcgttggaggagccactggtatttcttattcttttttaatgtttttactacaatttctcggctatagtcacctgttttctgcacagcagctcttatttcacgctggatttattggagtcgctattctagggggaattgttggcgtaaacattgccggttcacgagaagcataaaaaaacgtcacgtacatgtacgtgacgtttttttattaatctacgcttcttacttcacgaatagcattgcggtcaaacgttaattttgaaccgtcagtgctgcgaaccacaacttgtgactcatcgattgcgtctaccaaaccgtgcataccgccaattgtaacaaccttatcaccttttttaagtgctgattgcatttgctgtacgtttttttgacgtttttgctgtggacggattaacaagaaatagaaaatgacaaacattaaaagtaatggccaaatattttgtaaaacacccatgaaaactcctccttttatttatattatcaacaggtactcattcataaatttgatgaaaattcctgtagtgacctagaaattctttgcgtctggaccgttaaacccatatttttcaaagaactcatcacggaaatcgccaagtcggtcttcgcgaatggcttcacggacttgctccattaagtttagcagaaaatataagttatggtaagatgttaaacgaattccaaacgtttcattacaacgaattaagtggcgaatatacgctcttgaataattttgacacgtgtagcagtcacagtttggatcaatcggaccgaagtcttctgcatattttgcatttttaacaacaagacgaccttcgcttgtcataagcgttccgttacgtgcaatacgcgttggtaatacgcaatcaaacatatcgatcccgcgaatcgctccatcaattaacgagtcaggtgatcctactcccattaaataacgtggtttatcggttggtaagtatggcgtcgtaaactcaagcacacgattcatcacatcttttggttctccaactgacagccctcccacagcataacctgggaagtccattgaaactaaatcagctgcactttgacggcgtaaatcttcaaactctccgccttgaacaattccaaaaagaccttggtcttgagggcggctgtgagcctcaaggcatcgctctgcccagcggcttgtgcgttcaactgaacgttttaagtagtcatattctgctggataaggtgggcattcatcaaatgccatcataatatcagacccaagcgcattttggatgtccatcgctttttctggagataagaaaagcttgtctccattcaaatggttgcggaaatggacgccttcttcttcaatacggcgcaaatcacttaagctaaaaacttggaagccgcctgaatccgttaagatgggacgatcccagttcataaatttatgaaggcctcccgcttttttaacaatttcatgaccaggacgaagccataaatgatacgtattacttaaaataatgcctgctcccattgcttttaaatcttccggagacattgtttttactgtagctaatgtgcctactggcataaaaataggcgtttcaaatgagccgtgaggcgtatggacaatccctaaacgcgctcctgtttgtttacaagtttttatatgttcgtaacgaattgctgtcattgatgtattcctttcatgttaaattacaaaattagcatcgcgtcgccgaagctgaaaaagcgatacttctctactacagcttgttcataggcagaaatgacgttttctcttcctgctaaggcacttacaagcataatgagcgtagattttggaaggtggaaatttgtaatcattccatcaattgctttaaattcataccctgggaagataaaaatgttggtccagcctgaagaagcaacaaatttgccgttatgctcagttgcaatcgtttcaagggtacgggtagaagttgtgcctactgaaataatgcgaccgcctttttcgcgtacgctgtttagtaaagcagcggttccttcactcacttgataaaactctgagtgcatatcgtgctcttctaagtcgtcaacgctgactggacggaatgtacccaatccgacatgaagcgttaaaaatgcaatatgcacacctttttcttttaactgttcaagcatctcttctgtaaagtgaagacctgctgttggcgctgctgcagaaccttgttcgcgagcaaaaaccgtttggtagcgttcttgatcatccaagcgctctttaatataaggaggcagcggcatttctcccagttgttctagaacctcataaaagatgccttcatagttgaattctaacaaacgtccgccttggtcgctcgtttctttacatacagctgtcagacgtccgtcaccaaacgaaataaccgtgccttcttttactcgcttagccggttttacaagtgtctcccacgtatcgccttgtgtttgttttaaaagcaatacttcaatattagcacctgtatcttcttttgtcccaaataaccgtgcaggaagaacacgcgtgtcgtttaacactaaacaatctccttcttgcacataatcaagaaggtcatgaaacatatgatgcttcacacttcctgtttctttgtttaataccatgagtcttgacgcatctcgctgctcaagtggtgtttgcgcaatcaattcttctggtaaatgaaaatcaaataaatctactttcaaaatgttcacctgtttctacttaattatttaaatctgccaattacataaaaaataagtgataacacaacgcttactagaatacatgtcacaatcgggaaataaaaggttgtatttccttttttgataaaaatatcgccaggaagcttgccaacaaactgccataacagcccaatgacgactaaaatgccccctaatgtgataagcatcttaggcatatcattcactgatcaggcacctccagctgaaaatgatcataaaccaaaggcgtcacgattcgtcctcgcggcgtccgctgcaaaaagccgatttgcaatagatacggctcgtatacgtcttcaattgtgtgagactcttcaccaatagtagccgatattgtgtctaaccctacaggtccgcccctaaatttttcgataatccctcttaataatttatggtcaatatgatcaagacctaaacggtccacctgcaacatttctaatgcttcgttggcaagcctttcggttatggctccgtctcctttgacctgagcaaaatctctgactcttcgaagcaagcgattcgcaatacgcggagttcccctagcacgcctagccatctcaaacgtagctttctcatcaatctctacatctaaaatagcggctgtcctttctactatcgaagcaagatcttcttcttggtaatattctaaacggcttaaaacgccgaagcgatcacgcaaaggagaagataaaagcccggctcttgtcgttgcacctactagcgtaaacggaggcaaatccagacggacggagcgtgcactcggtccttttccaataacaatatccaaacagaaatcttccattgctgggtatagtacttcttcaaccgaacgatttaatcgatgaatttcatcaataaaaagcacatctccaggctctaagctggttaaaactgcggctaagtcgcctggacgctcaatggctggccctgaggtcgttcggatttgcacgcccatttcattagcgataatagtagcaagggttgttttccccaatcctggaggaccatataagagcacgtgatctaacgtttcgcttcgcattttggcagctttaataaaaatgtccagatgggattttactttatgctgaccaatatactgctgtaaggtttgcggccgcaaactctgctcgatgatttcttcttcaccaagaacatctcccgttacaatacgatcgtccattttactcctcccttacttattgtttcaataatcgttttagcgcttctttaatatactgatccgttgtcatcgtttccttcattaaagccggaacaatttttttgatttctctttctgcataacctaatactttaagtgcttcaatcgcttcatcgagggcttctgaactttgagatttgacttcttgtgcgtccaaatctgcaaataaagaagggacggcatctggtacaatatcatgcagctttccttttaaatctagaatcatctgtcgagctgtttttttacctactcctggaaacttaactaaaaacttctcgtcttcctcttccacagcttggacaacctgcgctggattacctgacgctaaaatagctaaaccgccttttgggccgattcctgacacgctaattaacttcataaataaatccttttgttctcgggaagcaaacccgtaaagtgcaattacatcttctcttacatattgataggtgtaaaccgtctttggttgttcatcaattgaaaatacatatggattcggcgtaaagacttgatagcctatcccgttgttttcgattactacatactcaggatttatatatgtaacagtgcctttgatataatcaaacaataagctctctccttaatcacgtacgcgcgggcagtgaccttcaactttgcctacgaagaatcctgcccgcatcgttctctattttcctttaaagttgctttttaaaaagacgttcaagagaacgtttgcctcttttcatctttgtcaacctatttttacaatagctataaaaaatagaaccgcacatttttattgatgaatgaccttttaaaatatatacaatactagactgctgaataccattttaacatatcgccaaaagcaaatagaagcaatttagaatgttgaattcaataattattttaccatactaaaaaacggctgcttgattgaaagcggccgctgctggagctgatagattttatagaaattaatgagggaaagatattcatcttttgattgaacgcgaatacctttctttaattgttcatgctgatagctctcaagccttttgatgtcaatttgaaaaaacgattgtataatatgctgcgacgcagctggtttgccttcaaatgctgagagaataccgttaacagaaagccctacataaccgttctcttttaaaataggtgaaatatcgtctatgcttgttctaaaaactagctcttgatccgtttctttaagcagtcgccaatttttatattttttcattaattgttttttcgtcatagaagggcttttgatcatctcttgacttataactccatccacatacacgcgctcaagaaataatgtcatcggctccttttcattcgcatctgcacggtatggcattatacaaagcacaatacttactatcattaaaaaagctgcttgatgaatgactttcttcactcaccttcacctcacacgttaatcatactctttttagtattatctaaaaaggttttgtgaaaatctacactaatagtttgacctacttattttcttttatcctcttattttatgaagcaaatcccttttacgatattatgttaagaaaacatggagtatttgttacatttgcacactatttgtaaaattttctcttgaacgttttaattaaattttcgcagggtatgtacatagtggaagtaattgtaaggacttctattatctattttaataaaaaagggagctgaagtaatgagaatgaataaacgtgtagtcggaacttttttttcagagaaagaagctttagatgttatcaataatttaaagcgtcaaggttatcgagaaacagacattatggttatttctaacagtaaaagcaatacatttcaaataggtcacgatacaaatgtaattattgaagctggttcacctgccgtaagttcattagctggcgtcatgatggataacttttttaccatgatgacaggcggcatggggctcaaacaaggaaacggcttgaaatcaaaattaatccgcatgggcataccagacttctcagccgtgcagtgcgagacagatgtagctgctggtaaaattctaatcttgatagatgccgtaagctctgaacaaactccagcgtacggaacctatacggaacacaacgagcatagagccgtccaactacgtgaagaaaaattagatgtcttaaaagaacgcgtccaagtcggtgaagtaaaactccacaaaaaagtaatagaggaagaaagaactgtacacgttcctgttacgagagaagagttttatattgaacgtcggcctgtagttgacggagactataacgctgggccacttacagaagatgaaattattcgtgttccaatcatggaagaacgagtggaaataaccaaacgaccagttattgttgaagaagtaattataggaaaaaaacttattcaagaaacaaaagaatggactgaaacaattaagaaagaagaagcaagcgtagaacctgatggactcgcgagccctgaagtatacgaaaatatgatgaactatacagaccatacttacgctcaagtttctgcagctctagcaagcgacgtggaagctgaatacgaaaatagtcagacaactaacaacgagaagccaaacacacaagctaatgagacaagctcttctgcaaaaaatgtaaaaaatacaaagagtgtcgctacggcaccagcagatacgaaaaaaagagaaggtcgcctcaaacaaaatgaaactaacgctcaaaaggaagaagcggaatccaaaacaacaaacaaatctgcttctaacaagaaaaattaatagttacatgttcgaggaatagctgcctggcttcaatggcagcttttttatatgtcttctcatcaaaaaaacagccgtccttcacagacagctgcttcttcatttaacgatgtttatgattgacattctcatcgactgattcaaatagaccattgaaattagtttgaatcgtattacggtcttttccatttcgaatatcgtcatcaagagagcgagcgttcataaatacatcatgatctacttttacttgaacattgtagtcctttgcaataggctttactttatcgagcacgttttgttttaaacggccgttatttatgtctttggccggatccacagcaactaatagctgatctccacggacaacggcgcgactattttctacacctttaacgcttgcagcccgatcagccactttttccgtaaagtctcttggataatcttcaccataatacatattagcaacgccatttgtacgatcatttgtattattgatgtttccataagggtttgtcggattatcaaaacgtccatcacttacgtttaacggataattaggtgttccattcccatctaaaacttcagtcattggacctttcggattatctacgcgatgttcattcgctttttcatttgtatgatacccaacaggctgtgtcgtatctgtatagcgctgttccataccttggtctttgttattgcaagcgccaagtcccatcatacatgcgaaagctaaagaagttgctacataactattcaacataatcgccccctaatttaagctctatttactctgagcttactattaggattaaaagacgagccgtttcttattcgatgaagtgtttataaactctttacatgtcatgtaggttttgtaagtgctggtaaatcactcgataaaaatgtgtacgctgtgaccattcttctactgattgctgcattaacctttggcgatttgcccatgataaagcagagacatttatattccagtttctcatcagcatcgatggaaatagtaaagaagcaagaaaaaaacgctgcttgcttaattcttttattttcgagtgttgaagtagttctttcatcgaccactggacgtaaggcaaaaagcgctgcacaagctgaacatagtcataaagagcaggagctttagccgataagtcaaaatcaatcataacaatacccaagtggtttgttttcaagaaattatgtgaagcaacgtcaccgtgaataatggaacagttcaacccactatctttgaaacgttccattaagactaaagctttttctccccaagtcacaatgtctttatatacatgaaattgattaaattccctgaatatatgtgaggtttctcgaaaagaggaaagccgctttttccattttaaaataaggtcatactcagaaagctttgtatacgcggctagtttctttttatgaacttctccatgatagcggatcaatgtttgtaatacttcttcccgatcctgaaaactttcatacgttacctcttttacttgcttaacaaaaggcatcatcgcccagtacaaatgacggtcctttatataaagttcaccttctgggtaagcttcgaaattaacagcatacccttgttgaatctgagataaaaaatgataaacatgttcaattttacttttgtctctgtatgcttttattactttttttcctttattcgtatccgctatgatgacatgaggctttttcatacgataggtctcaacgtgaatatctctttttttcaaatagagaaagagacgatttaaattaaaatcgtctcgtgtataataatcaatcttcatcttcgtcgtactcatcgtattctggaatactaaatgcatttggatcaaacgcaggatacggaggtacaccaatcatgccatatggggctggatagggtgcccttgggtcctgaaagccataaggtacctgctgttggtactgtggataaggctgctgtggtgcatagtcgtcaggtcttggttcaccgcatccgcagtctccttgctgctgtggcgcatattgctgcccataatggtaaggcgcgtttccaaaaccatcggaagaactttcataatggccacctgtcatagctccttgtacttgtggatacatcggtgcttgatgataggccggataaacgggctgctgatatccccatggaggcggacaaggagaacattgtaccggtccatagcagctgtgtggcatcattggatacattggcatcggtgccatgtgagcgcccatcgcatgttcttcaaacgattcgtgttcataaccgtgatgatacattggagcctgttgatacattggcattggatatggttgcggtgcatacattggcggatgacacggcatataattaaatccgcagcctggcatcacaggcgatatcggcatgattgggtaacatggcatttgaggaggcatttctatactctccatctcaggactttctggcgattcatgcttaggcagttcttttggtgcttctttttttggagcctgcatcgccatattaacggtgtaataattgttaatatcaatctcaggtgcaattggctttaatttaggaagctttggcgcaactggcatttcttttttaggctgcacaattggtgcttcttttttaggctgtgcgaccggtgcttctttctttggctgcgcaatcggcgcttcctttttcggttgagcaatcggtgcttctttctttggctgcgcaattggtgcttcttttatcggttgcataaacggtgtttgagcaggctgattagctgactttttctcatccggactttcatcaatttccgttactggataagcttttgtggattggtcactataagggtgttgaactttaggcatttcttttataccaggtgaaggagctccttctttttgaacaggcactccgcttgtcggcactttaattttcattccaggcatgatcatgtctggattgcttaattgagaattcgctttttttaactcttcaaaattaaccccatacttttcagcgattttccaaagggtatcccctttttgaacgatatggattttcaacgtcattcccctcccgagtagagtctctgccatctatatgtgcaaaatcaaagtaagttctgtttgttcatcacaagatatgccttgaaccatttttttattcattttgcccacagtttggttcaagtttttatgataaagaaaaaaagacttatcaacacaaacaatatgtcaataagtcttcttttagaccttctctttttaattgtcttaaaaatctttatgctcgttctaacatattcgttagcgctttgatcgctccttgtgctgtatgtttatccactttgatttgattcacttctgttccttcttctatgctttctaaagcccacagcaagtgaggcaaatcaattcggttcatcgtcaaacaaggacacatatagggattaagcgaaacaatttctttatccggatgactgttgataatccgtttcactaagttcatttccgtgccaatagcccatttagagcctgaaggagctttttcaattgtatcaataatatattttgtagaacctgcataatctgatttttgcaccacttcataagaacactccggatgaacaataatattcatctcaggctgcttctcgcgtaaataatcaatatttttaaccgtgaaattttcgtgcacagaacagtgacctttccatagaatcaccttgatgttgtttatatccccttcatattcaagtatttcttcaataggattccaaatagccatttcatctagtccaacacctaaatcataagcagtgtttctgcctaaatgctgatctggcaaaaagagaatgcgctcttttttagaaaatgcccactccaccatattttttgcatttgaagatgttactgttgctccatcatgttcacctacaaaagatttaattgcagctgtagagttcacatacgtaagcggaataatcgtatctccgaaaagatcctgtaagacaggccatgccttttctgtttgctgaatagtagccatatcagccattgaacagccagctcgcatatcgggtaaaatgactttttgattttcagctgttaaaatatcagctgtttctgccatgaagtgaacgccgcaaaacacaatatgctcagcttctctattttcagctgctatttgagccagctgtaaggagtctcctaccgcgtccgcgaactcgtacacttcgtctttttgataatgatggccgagcagaaacaatttgcttccgagctttttcttgatttctagtactcttcttttcatttcattttctgtgagctccgtatatttagcggggagcgtttgctgctgaagcgtttgtaataaactcatcattttctgttcccctttctgttaataagtccaagctgatatcgatagaccctgctgaatgcgttaaagctccaagtgaaatatagtccactccgctgtctctaaaagaatggagcgtgccaagcgtgattccaccagatgcttctgtgacaatatgagcgggaaccagtggtatccaacctttaatgacttctggagaacagttatcgaacataataacatctgctcctgcctctattgcttctagcaattgacttttgttttcaatttccacttccaccttaaccatatgtccaacctgctctcttactttcacaacagcgtctagaatagatcctgcatgtgcaatatggttatcttttaacatgacgccatcgtacaatccaaaacgatgattataacctcctccagcacgaacggcatacttctctaacattcgcataccaggcgttgtttttcgcgtgtcacatatacgcgtatgtgagctgccaagcagcgctacggctttgtgcgtcatcgtggcaatgccactcattctttgaagtaagtttaagattacccgttcaccggtcaaaatagatcgcacggatcctgaaacggtagctattttatctccaggcttaagaacatctccatcttttttctcgaaattcactttcacgttaggatctattaaatgaaatccttctttaatcaattccactcctgcaataatacctgattgctttgccgtgaacacagccttcccttggtcagacggagaaaaaatagcttcacaggttatatctccatctccaatgtcttctataaaaaaagactgcaatagtttttgtaatttcaacgtgttcattgtgctaccttcacctttctttttaaatttccttgcttataaaatcaatgattgttttgttgaaatagcagactgcttaataattcgcttatgctcccattcttgcttttcatgcggaaagtcacttcggtaatgacctcctctactttcttttcttgcaagagaggactcagcaataagcagacctgcagttagcatattgcagatggtcgctgcttccctcgaatatataacttcttggtcaagaggtattccatccagatgatttgtgaattcatgcacaatagtagccaattcgttttcatgacgaatgatgcctacacaatccatcatcttatgctgaatttgttttgtggcaggcagtattttaggcatgcctttatacacgtaacggacggggggataacgagatatcgttctcgctttatgtaaaatatgacgccctgtccgttttccaaatacaagacactctaacaatgaattgcttgctagacgatttgctccatgaacgcctgtaaaagaaacttcccccacggcatacaatccttcaacgcttgtttgtccataaccatctacttcaattccacccattaaaaaatgtgcgccgggagtaacaggtattcgttttttgtccagttgaattttatacttccgacacagtgccgtaatcgtaggaaatttttgttgaaaatgagccactttttcaatgtctaaaaatacggatcttccttttttcatttcattaaaaattgtccttgctacaacatctcgcggtgctaaatccttaaagggatgaactccttccattatgcgttcattccattcatttaccagtacgccaccttcgcctcgaaccgcttcggatactagacctttcgcttccttttgatacaaaagcgtcggatgaaactgaacaaattctaagtccgctaattttgctccagccctgtacgcaagcgctagcccatctcctgtcgccagcggctggttagatgtatgcttgtacaaagcgccgattcctccggtagcaataaccgtttgacgagcatgatatatagtaattttgttgttttcaccttgtccgatagcacctctgcacgttccatctacagttattaaatgctgaatcatttcgttttcaatgactgtaatatatggcagtactgcttttttcaaaaaagcgaacagcgcttgtcctgttgcatccccacctgcatgcagaatacgattcgtacgatgggctccttcttttccaaaatgcagcgtaccatctggatttttatcaaacttcattcctttatgaatcaattcatttactacagccgcaccttcttccactaaagtgcgtaccgcttgttcattgcaatgcttattgcccgcaaccaacgtatcatagagatgttcactccagtgatcgctgcttccaatagcagctgctactccgccttgagcaagaactgagttattgcggtcaagtttccctttcgttaccattacaactctgttatgacgacacagttcataagctgcagaaaacgctgctaatccgcttccaataattaaaacatccgtctctaacatttcacacctctttatttacatgtgtcttgacacctatatttacatattattaaatgaaagacaagaagtttttttatcggagggagaaaatgatttatctggactatgcagcgacaacgccaatgagacaagaagcaattgaggtatatactgaagcggcaacaagctattatggaaactccagcagtcttcacacacttggaacacaagcagaaaatttactgactctatgcagaaaaaaattaagcctgttagtaaattgtcgagaggatgatcttttttttacaagcgggggaacagaagctaattacttagctattcgttctcttttaaaaggaaaaaatgatgaaagaaaacatatagtgacaacgaagcttgaacattcttcggtgcttcatacgttgcagcagcttgaaaaagaaggattttccctatcttacgtacctgtagatcaaaacggagttgtgtctgtagacgacttaaagaagacgattcgacctgacactgtgctagtagccattcagcatatcaatcatgagctcggtacaattcagccagttgaggatattggccattttttatctaaaaaagaaattctctttcactgtgattgtgttcaatcttttggtaagcttcctattgatgttaaaaagctgaaagctgatagcatctcagtctctagtcataaaatttacggaccaaaaggtgtaggaatggtatacatgaattcaagttcttcttggaagcctatttaccataaagcaactcatgaaaaaggctttcgccctgggactgtaaatacaacgggcattgctgcctttactgcagcagctgaatgcgcatatgcagaaatgaagaccgcccgaagccattatgagcgcttaaaatcgtacttactggaaaacctagagcctcttgctccttttatagaagtagaaggccttgggaactctcattttcctggaattatgggactgacgttttcaaacatacagggtcaatatgttatgttacaatgtaatcgtcacggaattgctatctctacgggaagtgcctgtcatgtaaatcagcaggaaccattagcttctctgcttgcgattggcaaatcgactgcgaatgctaagaattttgtccgtatttcattcagtcaacattcaacgtttaagcatattgatcgactcatatccgtttttcatttattacagcaagaatttatgacagtgtaaaaggagggattaaaggtgccaggaactcaaaagaaaattcttggagaagaaagaagagaacttattctacaatggttaaaaacagagagtaaaccaatgacaggcagtgagctttcgaaacgaacgaacgttagccgccaagtcattgtacaagatatttcgctgcttaaagctaaaaatgagcccattatcgcaacaagccaaggatatatttacattcaaaatccatctcaaactaccgtgcatcagcgaattattgcctgtcagcatacgccagaagatgctgaaaaggagcttctcctgcttgttgaccacggcgttctcgtaaaagatgtaaccgttgaacaccctgtgtatggtgaattaaccgcttccgttatgattcaaacccgaaaagaagtagaaacgtttatagaaaaaattcaagaaacaaacgcaacttatttatctcagctaacagatgggattcaccttcatacgattgaagcagatacaattaaaaaactgaatgctgcctgcttagctcttgaagcggaaggctatttagtttcgaatgaataaaaaggtgttataacaaaaaaaatcccgctttaaagcgggatttctgtttcaagtagtgtatggggatagcttcctaaaagctctacgctacagcctagtgcctcaagttcagccatagccccagggattaatacttcatccattttttgttcaatatcaacgataaagaaatagtttccaagccctgttttcataggacgggattcaattttagacagatttagcttacgccaggagaaggctgaaagcacttgatgaagcgctcctgcctgatcagatggaagtgtaatcattaacgttgtcttgcacccgtttccagctaaaaatggcacctcttgcgctccatctttatgcaaaataacaaaccttgttgtattatgatcataatcatgaatgttcgggcaggcaatatgtaatccatattcatgggctgctaacccattcgcaatagctccaatattaagctcagggtgttcgcttacatacttagcagcaaacgccgttgatgtcatctcttctactgcagttgacgtacattctccgtgtaaaaatttatgacactgcgcaattgcatgaggatgagaataaatcgtttcaatgtttttccactgttctgcacgagatggatgaaccattaaatgctgacgaatcggaagcacaatttccccaacaatcggcagacgacgttcatgaataagataatcaagtgttaaatttacagatccttcaagtgcattttctaacggtacaattccatactcaatttctccgttatccactgcatcaatgcatgctggaattgtcttgtatggaatatggtcgtgctgtttaaatacgccttggacggctacatgtgtaaatgttgcctttggtcctaaatatcctactttccccacaatcatgcctctccttatctatatctgtttgccattatgcccctgaaccaagcacgtccactttatctacaaactctaagcttttcagtcttcgcagcatttcatttaattcaacattcatgcttgctgtatctaatgaaagagttacgttggcacgcccttgtaaagggatggtttggtgaatcgttaacacattgcatcccgatgatgcaacggtgctcaataaatgtgataaagttcctgatcgatcttcaatatgaaaaaatagtgaaataattcgctgtttgacaaccgtctgaaacggaaagaccgtgtcgcggtacttataaaaagcactgcgactcaagtctacggcttgtacagcatctgctaccgattcagcttttccccgttcaattaacagcttcgcatccaatgtttttttcatcgcttctggtaatacatcttcgcgaactaaataaaactgcttatcgctcttatgcaagtaaagcccctccccttatcctatgaacaacaattagtcaataaattcaaattcatattcaaacagctttacaatatcgccatcttttgctcctcgttcacgaagggcttcatcgacgcccatgcctcgaagctgacgcgcaaatcgacgaacggattcttcacgtgagaagtcggtcatcttgaataatttttcgattttttcaccgcttaatacgtatgagccatcgctatcacgcgtaataacaaattccacttctttcttttcatgcttgtacagtacgcggtgcatagatagatcttcctcttcttgcattgggaattccggcgtagtttctacaagatcagctactgtaaataacagttcgcggattccattacgcgttgctgcagaaattggaaagactttcacttcgtctcctactttttctttgaatgcagctagattctcttcagcttgcgggatatccattttatttgctaccactacttgcggacgttctgttaaacgcatattatattgacgcagctcttcattaatggttaagtaatcttcatatggatcacggccttctaaacctgacatatcgattacatggacaataacgcgggtacgttcaatgtgacgtaaaaactgatgacctaatcctacaccttcatgtgcaccttcgattagccctggtaaatctgccatcacaaaactgcggttatcttctgtttcaactactcctaaattcggattaattgttgtaaaatgatattcagcaatttttggctttgcagcagacgtcacggataataacgttgactttccaacacttggaaaaccaactaatcctacatcggctaatacttttaattcaagaattacatttctctctttacctggctctccattttctgaaagctccggtgctggatttgcaggtgtagcaaaacgcgtattcccacgccctccgcgtccacctttagcaatcactgcacgctggccgtgctcaactaaatcagcaatcgtttcgttcgtatcttcatctaacacaaccgtacctggtggaacttttacaaccatcggctcagcgttacgtccgtgctgtccttttgacattccatgttcaccgcggcttgctttaaagtgacgcttatagcggaaatccatcagcgtacgcaatccttcttctacttcaaagatgacatctgcaccgtgaccaccgtcaccacctgcaggacctccttttggtacgtacttttcgcgacgaaaggcaaccattccatttcctccgtcgccaccttttacatataccttgacctgatctacaaacatttctttttcactccgttctatatcttagctcctgcaatagcaaaagcgctgttaacttattgtgagcataaggctaaattcatcttcagacatatgctgttgaaccaatgcaactccttgagcgcactcataacattgtagcttgttttgtagcttctgtatatctgttagtattccactaaagtcaaaaaagaaacgaattccctgttcttcaatgcatactgaaatactcaaatagttttctgcatgataatcaacatatttttcgagtgcttctgtcaaatagctacaccagttgtatacgaactcatcgtattgtgataaatccttcaattctcccagcacttccacatctaagcgaacagcatggttattccaatgataggtcataacaaagcccgcaaacagtcgcatattgatgtttgttaacttggattcatgtttggattcatttacaatttcttcaatgatttcattcgctcgatcaagccgattcaacgctagattgcctttgattaattgcagcttatttaaccaatcatgccgcgcgtatcttaatacttctacgacatcccattctttttccatcttagcactcctaactttgactcgagcataagtatttcacaacgctgacaaacatctcgtatcaatcttcttagatatgttcgattataacaaattccaatgggtaataggtgaaatattctacaaaaagaaaactctaacctacttgggttagagttttctttttgtatcttatgcttcttgagcaacagggtatacagatacttttttacggtcacgaccgaaacgttcaaatttaacgataccgtcgatttgagcgaataaagtatcatctccaccacgacctacgtttgcacctgggtaaattttagtaccgcgttgacggtataaaattgaaccaccagatacgaattggccatcagcacgtttagcaccaagacgtttcgagattgaatcacgaccgtttttagtactacctactccttttttagaagcgaagaattgaaggtctaatcttactaacatgacatccacctcctgtttagttgtcgttaatttttatataattactgtaatctaattcgatcgttttcagtgaaacaaccataccttctaatagcaattgaatctgttccaatgtgaacgaatccacatcttttgggatctcacaacggagatacccaccatctccaccttgctctaagtgcggttcaaccccacttattgaaaagatagcattaattgtcccaaatgaaactgcagatgctcccgcacaaacaagatcttttccgtgttcggaaaagtcagcatgtccactcatcgtgaacccgtcaactttcttatttgcatcacgagaaatcgtcaccttaatcatttgttataattacgcgttgatagcgtcgattacaacttttgtgtaaggttgacggtgaccttgcttacgacgatagtttttctttgctttgtatttaaatacagtgatctttttagcgcgaccttgtttttcaactttagccgtaactgttgcaccttctacgaaaggaacaccaactttcacgctgtcgccacctacaaataatactttgtcaaaagtaactgtttcgccttgttcaccagcaagtttttcaacgtagattgcttgaccagcctctactttaatttgcttaccaccagtttcaataattgcgtacattctctgcacctcctctaaaaactaagactcgccatcacaggtgttcaagtgaacttaaaacctgttctgagcggttgtagcacgggtgctacaaaccaacatattaaatcttactacaaatcaaaggttagtgtcaattggaattcatgttttcttctaaaattttatatagaagcagagacccttttttgaatctgctcattcgaccccaattgacgcaaaacaaatgcgtttgtataatcatcgcttggcgtaagatatacggtttttttcaccatttcctctagagcgttgagaaatccttgcgccttcatttcatttataacatcacttcgcgtctcaatccaaatagcctcttcttccgcgcctcgatgttcccaaattacacgttcaatttgaaaagcagccgttttggaatcaatcattttaccggttccttcacacacttcacaaggcatagttaatgttgatccaatactattgcgcactttcttcctcgttaattgcaatatgccgagctctgtaaagccaactacattcgtccgcacttcatcttgttcacatagctttttcatgtatctttctacttctgtccgatcttctttgtgaggcatatttataaaatcaattaagatcatgccgcctaagtgacgtaattgcatctgtttggacagttcatatgcagcttccatatttgtttgaagcattgtctttcgaatattatcttttcctgaaaacttccccgtgttcacgtccacgaccgtcatcgcttccgtttcgtcaataacgatatagcctccgcttttgagccatacgattcgctttaaaagcttctctatttgccgttccacatcgtaaaaagagaaaatattttcatttcctttataatactctattgacgagttaggataggtagtttgaaggtgctgatataggtcgaagtcatctactactatcccatcaattccttgttgaagtgcagcttgcactcttgtttcaagaaaatcttgtcctttgctgactagggtaggagctttcattccctgtgtctgtcgttcaaggcgctcatatttttcctgtagctcttttatttcatgttggaccgcggcttctgatttttctgcaatcgctgttcgaaataaaaagccttccatcccttgttttaaccgctcaccaagctgtttccactgttgtcgttttggctcggctatttttttggatacagcgacatagtttccgtgcggtaaatatacaagctcatcagaagaaaattcaatgatacccgtcagcttgggcccttttgtcccaatgccttcctttacaacttgaaccaatactttttctccttcacgaataaaagcagacatcggctgctgatctttgtgaggattctctgactgctgataggatacaagttcatttcgatgaataaatccgttcattgataaaccgatatcaataaaggctgcttgcatatgcggcagtacttttactactttaccccaatatatatcaccaataatttgattctcgctttgttcttgtaaatagattttttctagtgctttatcgtttatcacggctatacgttttgaagaagtagccgcgttaataatacatgccttcacatacattgcctcactttaatctaaattcataggaaaaagttcggtcagtgcaaccgaacttttttcattctattctatgttactagaaatcagtaaactgttacaagttcgtctagttggctatttgttcttttttctacgaagtaagcgtgtaaaagttcattttcatcaatttgtacatgctcgcctgtttgagatgtagcaataatcatatgcttacaacctctttggaatttttgcagaacttgatggagcgtctcactggttgatacacttagtgtttttaaagctccaattggatgctctttgccatgatatctctccaacaaaaagcgcatgtagacaaattgcctcctcttccattccaaatatccggatataattaaaaatgaaataacaatccataagtgcagctgaaaaggatgcataatgacggcataaataataccgacagctaaaaaaaacgttgataaccggagcgcaagcttatgcgcttctaaaaatggtaaagaccgactgcaaattaaaaaaagcagcttccctccgtccaatggccaaatgggcaaaagattaaacaggaaaatcaccgtgcattgaaacataaattgctcatatgtttcgaaggacaacacatttattttcattaataagaaagcagctccaaacatccagagatgctgaagaggtccacttattgtcacaataaactcttctcgaaatggacgattcccatgttcatctacttctgctactcccccaaaaggtaagagcataattctgcgaatccgccaagaaaaacactgagccgctacggcgtggcccagttcatgaataattacaataataaatagcaaaaaaagctgctttaccgtagcggttaagataccaattacgaaaatcccccaaaacaatggatgaatgtgaattttcatcaataacgaaaaagcactattcaaattgaatcacctgactaggatcaacaaacttatcgccttttttaatagcaaaatagaatgttccagcatcgccttttttactgttttccacaattcctacttctttgcctttattcacaaaatcatacatactaacattgatttttttgagctgtccataccaagtttcgcttccatcggcgtgttgaataataacggtattcccagtatcatcacgttttcctacataccttacgataccttcactcattgcttctacaaccgaatccactcctgtttgaaccgtcacgccttgcttactttgagcaaatgtttccgttactttccctgaagctggagtagcatattctccgcttacactttgctccgtttttctagactctttattcggcaatagcgttaacggcttcccaaacttatcttcataccaggaggaaacagctgcaaactgaaattctttatccattgtttgttgaaccactactctggcctggtcaaaagtaggagaagcgttcttgaacataattcctacaattaacactaagcaggctgaagctaaaattttaaataaaaagcgttcttttcgaaataacgggtggtattcctttgctgatggtgtgtattcaaccgcagaataatccatcgatccatatttttcttcttcactcattaaggacgtatgaagaggttcttgaggaagacgcttcgttgtatttaattgttttcgcttacgctcagcaattcgtttacggatttcatcagcacgtcgattcatgattcatcattctccttgttcttatcgtataatcaactatatgacttgtccgtggagcttatgacagcttgactctacaaaatcaaacaaataaaaaaagcttcctctatcggaagctttttaagaacgaacaccaaagaatcgtttaatacgtgcaaacattcccttatcttcttcatctaacgattgaagaggaaccgtttcacctagaatacgtcttgcaatattacgatatgcaattgatgctttgcttgatgggtccatgacaattggttcaccgttgttagaagcacgaataacattttcatcgtcagcaacgattccaattaaatcaacagccagaagctgagaaatttcttccacatccagcatgtctccatttttcatcatatgactacggattcggttaataaccagttttggagactcgatatcctcttgctccaataatccaataatacggtcagcatcacgaacagctgaaacttccggtgttgtcacaacgagtgccttatcagcgccagctacggcgttcttatagccttgttcaataccagctgggcaatcaataaccacatagtcatagtcttgctttaactgaagaactaactctcgcatttgttctggttgaacagctgttttgtcactcgtttgagcagcaggaagtaagtacaaacattcaaaacgcttgtccttaatcaaggctttttgcggttggcatcgaccttctaccacgtctacaagatcataaataatacgattttcaagccccattacaacatccaagttgcgtaagccgatatcagtgtctactagacacacgcgctttccagctaatgctagagcagtacctaaattggctgatgtcgttgtttttccaactccacctttaccagacgtaacaacaatagcctctcccactgtcaaattctcctttctaccctggtcaaattcggtcttagatgcggtaaagtttgcacgcgatctatcaccatttgatcattatcatctaagtatgcacattccattatattctcttccttctcactgcgctcttcttctgatcgggtaatgatatcagcaatgcgcagctgtgaaggtttcattaacgatgcagcaataacggcgtttttattgccgcgatatcctgcatgagcaatcccttttaaagcacctaatacaaataaatttcctccagctacaacggttcctccgggatttacgtctccgactagaagcaaatcgccttctacatggagaacctgtcctgaacgaactacctttgtaacagatactaattcactttcttctcttacgcggactgcatcttgctttaaaataacgttactatcaatttgtttaactactaaatactgattttcttctatgagcgccttcaattcggtttcctgctctgtagttaaataacgatttccgattttgacatacactgtgacgatctgatcggcatcgccatgcttatttgtcaaaagcttcgtcttaagttccgtcaaaagctctgcaaatgaacatgtatcattgagatgcaacgttaatccatcttttgttcctttaattgtcacattttgttgcttttgtttattcaagacgctcacctcaacgaatatataatttcgacagagacttactcaattcctttttttcgtttcttcaatcagcatttttatcctatcacgaacgagaagcgtaatatatgttccgatcagcgttcatcgataaatttagcaaaatattgaaaacatctttgaagcggaaatgcaaaaatgagtgcaaatatggcatttaaaatgatggttgcgtaaaatcgctcttgcaagaagcgaccaatggtcatatcagatatattaataatgctattaattccatatacataaaactcaataatggctacagctaatagcgacatgcagattacgataagcgtattttgctgaaaaatcttcattagttttgatacgatatagcatacggccggtaatccaagcgcgtatactcctaagacatccgtaaaggcaatatcgtacatgaatccaaggattaccccatatagcatcgcttgctttgggtgataatacactgacataaaagccagtaccactacaacaaagtgaggcgatagaatccagtctcgccatggtgatgccatggcgacaaaattaacaaagatactttcaaacataaaaacgacaagcacgagaataggaaggacaaaccgcttcatcagttagcctcctccgcccctaaatcgtcttcagcagcgggcgcacttcttttagctacaactacgttatctaagtcatacaagtcagcagcaggtttgatataagcttttttcgttaatccatattcatcaggctcaatttttgtgataacgccaattggaagattgctagggaaaatgccgtcttcttgtcctagaccagacgttactactttttgcttttctttaatatcagcatcaaatggaatacgacgcataacaagcgcctgttctttatcatcatagccttcaattaaaccaaatacttcttttttagcctgaattttagcagatacacggtttgtacgatctgatgaactaattaactgcacagtagatgtgaacttagatgcatgcttcactttaccaatcagcccttcaggagtcataacagccatattttcctgcacattatgaaccgtccctttatcaatggcaattacctcatgccaacggtctggattacgagcaataactgttgcttcgattgggttgtattgacttaaatccgtttttttgtcgagctgtgctcttaattttttattttcttgctgcaaagcgttggctttcgtttctaattgcatgcgttcgtctaaacgggcttttaatacctcgttttcttcgtatgtacgctttaagtcacctacattctgaaagaaacccgctacaaattgtgcgggttcattaaaggtagcctgaacaagaccaaccgtatctttgacaaactgttcaggccacgttacatttttacgaccatttaacgaaaaaccaatcaatgccactaatacaataatactgactaataaaataactaaacgtttatttaagaaaaattgtggcacgatctacacctcttaatatttagcgatatgaatcgcttgtacgatttttaaataaatcaatgtgttctaacgctttaccagttccaattgcaacacagtcaagcggatcttctgcgatgacaaccggcatatttgtttcttcactaataactttatctaaattacgtagcaatgcgccaccgcctgttaatacaataccgcgatccataatatctgccgcaagttcaggtggtgttttttctaatgtactttttactgaatctacaatagaagccactgtatcttttagcgcttctgcaatttcttctgctgaaatttcgattgttttcggtagacctgttagtaagtcacgtccgcgaatttccatgttttcaataccttctggaattccggcagaaccgacttctacttttaatgcttctgacgtacgctcaccgatcattaaattgtaattcttgcgaatatattgaataatcgcttcatccatctcgtccccagcgatacggattgactgacatgttacgattcctcctaaagaaataatcgcaacttctgttgttcctccgccaatatctactaccatacttcccgttggctcccaaaccggtagattggcgccgattgctgcagcaaacggttcttcaattgtatacgcatcacgcgcgccagcctgacgagtcgcatcaataacggcacgtttctcaacagctgtaatgccagaaggtacacaaaccattacatacggcttacccgcaaacaaactttttgttttttgagcttgattgatgtaatatttcatcatcgtcgcagttgtttcgtaatctgcaataactccatctttcattggacgaagggctactacgttcccaggtgtacgaccaatcatattttttgcatcgttacctaccgcaacgatttgttttgtatcagtttgcaaagccacaacagacggctcacgcacaacaattccttttccttttacataaacgagcgtatttgcagtacccaaatctattccaaggtctctagtaccgattccaaacatgtgtctcttcctttctcttaccaaaatgcaaaggtaaaaattccataattcaatttcttcatttcataagtaacattttttattttctatacttttttcatagatgtcaacgccaaatattgtatgataaaaagtcatactttgtctattaataacgaatgattgtaaagaacttgtcatttaaaatcatgactactattataacccaaggattttaaaaagcatagccttacatgtatcctttttcttttaaactaatatattttcgatctccgataattaaatgatctaacaattcaattcctatgataaatccgcactcttttaagcgcttcgttacctctatatcttctctgctgggagtagggtcgccggagggatgattatgaatacaaataagggatgcagctgaacgacgaaaggcttctttaaatacttctcttggatggacaatagatgaattgaggcttccgataaaaatggtttgcttgtggagaacttgatttttcgtgttgaggtataaacagacgaaatgctcttgagacagcacgcgcatttcttccatcacataattagctccgtcttcagggccatgaacggtatatcgctgactagatttccgctgtacaatcctcttacctatttcaatagccgctataatttgaattgcttttgcaggtccgatacctttaatattcatcatttcatcaagcgatgcatgctgcaaaagttgaagaccttcaaaatgcgttaatatgcgattggacagctgaagaacagattcatctttggttccagtgcgcagcaaaatagcaataagctcgtggttagaaagactagaagcacccattgacataaggcgctctcgaggtctttcatcttgaggaaaatctttaattaacaatgattgatccaatttcgccactcctttttagtaaacgaaaccgtattgttttagctcacgtattgttcgggagagcggcaagcccaccacggagaaatagtctccttcaatttttttaactagcgcagcaccgagaccttgaattccataagaaccagccttatccataggctctcctgactctacgtactgtacgatttcatcttgttcaatcggccaaaactctacatctgtttgttcataaaacgtatgaacttttgcatttgatacgaacgctactccagttaatacctgatgtttttgacctgacagcatcgtaagtgtttcaatcgcttcttgtttcgtttttggctttcctaaaatacgattgccatatacgacaactgtatcggcacctaggacaatatcctctttatgatgcgaagcgacgtccactgctttttgcctagctaaatccattactacctcggacggagtgtataatggattgacgatttcttcaattgtactaacgtgaacggtaaagggaatgtgaagctgctgaagtaattcttttcgacgaggagagcctgaggctaaaattaatgtttgtttcatacatctcacctttgcattttgatttaaaaaagaaggacacaccgttattttagcaatttcatccccaaatgacaataaacaagtgaggcagcattacactacctcacttgttaagacgttacaaggctttcatactgctgaagagcttttaacacgtatcgctgagcaagccaagcatctttactgcttttattgtcttcatatgaagaaagagaagcagcagctttttgaagggtgctcaccatggttttaatgtcttcatttgacgcttctttctgaacttttgtcagctcttttttcagagatttgatatcggctacccgctgtccttcaatcgctttaacagattgatctaagagattagccataaacggctgcgctgtggttataaccgtttgatcttttttccctaattcgctagtgggcttaatttcataagactttacatatacatctttaccttgttgtttatacgttttactaagtgcgttcgctttttcttctccagtggcagcaccaacgacaagagaataggttttaggtgaaaagatctcgcctgcttcgttctcttctttccatttatccattgctttatttgcagcagtttttgatgaaaaagcacctgcttgaacaatgtaaaaggaaaaaggttctaaagtagaaacagcagctgatgtccccttcgattcctgttcgtttttcttttcagctttaccaacactttcagtggcagacgctgtttgagaagttttttcttctttcgtttgctcacttgtttgtgctttgcttacaggctgttcgcttcctgtcatcattttcacgccaaccataccgatgccgctgcctattccaactgctagcagtacaatcacagctgttcgtttgatcacaccgccgtttaccgttttaatcgaaacatttttaggatgtaatcgcggctttttctttttttcatttcttacatcttcaataaataccactttattttcttccacatgagaatctttggatgccggctccggaagaacccatgtaaattcgtctttttctggcgcttgttcttccttctcatccttggattgaccattgattttaattgaaatttttcgttcctgcttgtccacttccccaccgcctttagttaacgtagtcttaataccggttgcaagctgaggtaaaccgacataaaacatacacttttttccatgctatcatagaagaaaaaaaaaataacaagacatttgtcgtcttgttacaaaaggttttcgctatttagttacagaaatttcaaatttgtcgaagatttgaagctcaataaaaatagttgctaacataccaatctatcaattcgtttccatgaaaataagcagcgattgtccctataaaaataaaaggaacgaaaggaattggtacacctacctttgcctttttcattaataacgctcctatgctaacggttccgcctattaatatagctaaaaaaagcgatagcaaaacaagctttactccaagcacaataccaatcaaaccatacaatttaatatctccttctccaaggcctcctctgctgagaaatgcgactagaaagaggagaaaaaatgctattcctcctcccattaaggaatcactccacgaagttaatggaatgaaaagacgctcaagaagaaagataggcaaaaagaaaagcagtaccttatttgggacaatcatataagctatatctgagacaactataattgttaaaaaagaaacaaaggttaatatgacaatcagttctaacgtcatattcaacctaaaaaaagcatatacaaataaacttcctgtcgaaaattctacgaacgggtagatgaaggagatttttttgcgacacatactacattttcctgcatttttaatgtaggagactatgggaattaactgttgtggagaaagaacgtataaacagtgtggacaatgagatcttggagataaaatagattttttctgaggaattctaaggcctgctacattataaaatgaacctagagtgagacctgaaacaaatagataaaggtaaattaaactcatacgactccttccatttcaggggtacagaatattaactgtagattttcttttgaatgaggcaatgtatcttttccttttaaatagctgccaataaacggaatgagaaaagctgctagaagacctattatgataaccagtatgatcacttgcattagagaaagtcctttattcttcgtggacagtttatccatttccacacctctcctttattgattagtatcaaacagctccttgattaatacactgaatcataatacccataaaagtcatattctgtatgcctccttccttaaaacacaccttttataggtaataaggattataccactaaaaaacaataacagcataaaaaaaacgtctgcaaaagcagacgttttttaatagtaaggagccataaataagtagacaattacacctgtaagacttacataaagccagattggcattgtccatcgcacaatttttttatgtttttcaacttgcattgtccatccccacacaagtgcaaacagtgccagcggaacaataatcgctgctaggaaactgtgtgtgatcaaaataaagaagtaaatgggacgaacgattccttctccaccgaacgtggctgtttctgtggagatgtagtggaacgttaaatatgaaactaaaaagagcagtgtggaagtgaatgctgctaaaataaaacctttatgagcattaatatttttcctgaaaattgaaatcaacgctgcaactaaaaaaataaacgtaaaactattcaaaatagcatttaaccgtggaaagatagtcaaatcaaaacttacttttccttgatagccaatattcgaaaagaatagcagtaaaataataacattcgctatcactgaaaaggtaagaataataccggtaaagtttttattacttttcggtacaattttttcattattcttactcatgttaacaatctccttatttagtgatgtacatgtttattatatatcacttacctagggggtgaaagtgacaatactttgaacttagtgcttacttattatccctattccttccttacattgtgttaaaagcagcaagattccacttgctgcttttgctcatttgagaagaaaagcccgcacttctgatataaaatacagagaccctgtaatcacgaccatgtcttgttcacctgtcgccttttcctttacgtaagcaattgcttttttccaattctcgtccatatgcttattatgatgagtactcatctcataaagctccgcggctgtgcgagcacgaggaaagtcaaacgacgtaaatgtaatacttgcagcgattgtttcaagttcttggaccattcgatcagcgcttttatcatttaagcagctgaaaactaaatgaatgtttcgatcttcataatgaaggcgtaaagtagataacaggctatcaatgccttctgcattatgagccccatcaataatcgttaagggatgctcatttactatctcaaagcggccgttccactttgtatgctgaatcccttttatcatttgctctttggagatagaaagctttttcttttcttttaaataacaaacggccatgagagccaaagctgcatttttaacttgatgatagccaagcatatttaattgcaagtgtttaaatgtgccatacggcgtttttaacgtaaagccttctccatttgctaagggctcatagttttcaattttaaattcttttcctaacacaaataacggagcctgcttcgaatttgcctcttctgtaatgacgtcaagcgcctttacctgctcggcacccgtaataatagggacttcttttttaataatccccgctttttctgctgcaatttcttctaccgtatcacctagtatcgccatgtgatcaaatccaatgtttgtaataacactcaccataggactcacaacgtttgttgaatcatatcgtcccccaagacctgtttcaaacacagcatagtcaactgaatcatgatagccgaaataaagaaaagccatgattgtaatcacttcaaattccgttgctgaccctaagtccgtatgttctagtcgctccactacaggctttacttcctgaacaagagcggtcattgcttcatttgaaataggctgtccattcacgctaatccgctcattaaatgtttcgatataaggggaagtaaacgttccaactttataccctgcttcttctaacatgtttcgcaaataagaaacagtagaacctttaccattcgtcccagcaacatgaatagcatttatattttgctgcggaaaatcaagctgctctagcatccattccattcgttctaaccccggcttgattccaaagcgaagtctgttatgaatccaatcaagcgcttcttcatatgtcgttatcatcttttattcacctttcttttccatcgctattattatgtaaagaaaaagcgtcgctatacaagccacgctttttctgttcattcattaacccattgattatccgcgtaattcagcaatacgagactgaacagcttcacgtttttcaacgtaatcttgctcttttgcacgctcttcttctactactttagcaggcgcttttgcaataaagccttggttgtttaatttcttttgtacacgttctacttctttgtttaacttgtcgtattctttttctaaacgtgcgatctcttcttcgatattaattaaaccttcaagaggtaaaattaattctgctcctgttacaacagcactcatcgctttttcatctaatgaaacatcggttgaaatcacaagctcacttggattacagaaacgttctacatacgcacggttcttttcaagctggctttgaatattttcatctttagctttaataaataattttacttgtttgctcatcggcgtgttcacttcagcacgaatattacgaacagcacggataatatctacaagtaaacgcatatcgttagcagcttctttatccgaaagctcagcgcgtacttccggccatttagctactgtaattgattcgccttcatgcggcaagctttgccaaatttcctcagtaataaacggcatgaatggatgtaaaagtcgcattgtgttatcaagtacataagctaaaattgagcgcgttgtctttttagctgcttcatcttctgcgtaaagaggaagtttagccatttcaatgtaccaatcgcagaaatcatcccaaataaagttatagagaatgcgtccaacttcaccaaattcatatttgtcagctaattttgttacgtgctcaatcgtctcatttaagcgcgttaaaatccatttatcggcaacggatttttcgcctgataaatcaagctcttcaaatgtgatgccatccatgttcattaatgcaaaacgagaagcattccaaattttatttgcaaagttccacgtcgcttcgactttttcaaagctgaagcgtaaatcttgtcccggtgagcttcctgtagataagaagtagcgaagagaatccgcaccgtatttctcgattacttccattggatctacgccgttaccaagtgatttactcattttacgaccttcagcatctcggacaagaccgtgaatcagtacatcgtcaaacggacgtttacccgtaaattcaagaccttggaaaatcatacgagatacccagaagaagataatgtcatagcctgttacaagcacatttgttgggtagtagcgtttgaaatcagctgcatccacatccggccagcccattgttgagaacggccatagcgctgagctgaaccatgtgtctaatacatctgaatcctgttcccagttttcgatatctgctggagcctcatgatctacgtatacctctccagtttctttgtgataccaagctggaatgcggtgtccccaccaaagctgacgcgaaatacaccagtcgcgaatattttccatccagtgtaagtatgtcttttcaaaacgatcaggtacaaagtttactttttcttcttgtttttgaagatctactgctttatctgctaacggctgcatttttacaaaccattgagttgataaataaggttcaacaacggcaccgcttcgttcactatgacctactgaatgcatgtggtcttcaatgttgaacaatacgccgtcttcttgaaggtctttaacaatttgcttacgacaagcaaaacgatccattccttcatatttacctgctttgtcattcatcgtaccgtcttgattcatcactaaaatacgctctaaattatgacggtttccaatttcaaaatcgttcgggtcatgagcaggcgtaatttttaccgcaccagaaccgaattccatatcaacataatcatcgcctacgataggaatttcacgccctacaatcggaaggacaacctttttgccgattaagtgcttatagcgatcatcttcagggtgaacagctacagccgtatctcctagcatcgtttcaggacgagttgttgcgatttcaatatgtccagaaccatctgccaacggatagcgcatatgataaaacgcaccttgtacatctttgtaaataacctcgatgtctgaaagagctgtttttgtagctggatcccagttaataatatattctccgcgatagattaacccttttttgtaaagcgttacgaatacttcgcgcactgctttagaaaggccttcatcaagcgtgaagcgctcgcgtgaatagtctaagccaagtcctagcttcgaccactgctggcgaataaagcttgcatattcttctttccatttccatgtttcggctacaaaattttcgcgacctagatcgtagcggcttttcccttcgctgcgaagcttttcttctacttttgcctgcgttgcaatcccggcatggtccatgccaggaagccataaaacgtcatagccttgcatgcgcttcatacgcgttaagatgtcttgtaacgttgtatcccaagcgtggcctaaatgcagcttgcccgttacgtttgggggtggaattacaattgtatatggctctttttcaggatcatttgttgcttcaaaaaacttcccgtctaaccaatactgataacgattttcttcaacggcttttggatcatacttcgttggaagagtcacttctttttcagacataatgtatacctccataatataaagtttcagtctttagaaactgtgtaaagcttttataaacataaaaaaactcctttcctaataaaaggacgaaaggagttgatttcgcggtaccacctttttttatagacctatcccgtttgataagcctatacacttcatttcataacggttgattaaccggctttttctactgagctatgcagctgttcaaaaaagctactcataggcgacattccgagtgcacattcttaagaaatctcacagcagctgatttctctctctgaaagacgaacatcccgtactcttcctattcactgtatttatgtatgaaattctcttaattatactatatgaaaaaatgttgaatcgtcaataatcttctccacttttttacgattatattcataatttttttgttctgctctttattttttcattcactcgctaattttggaaataaaatgaagagtccgctcaaaaaaatggcaccatttctttcttttttcatatacttactttaacctgggcacgtggattgaaaggggcatgtacaaatgaagaaacgaataaatgtaaattcgtatcagctgcagcggtggctcaaaacagcaggagcggcttgtggacagtttatcgttcctttaacaatttttcaaggtatacgtacactatttttccctacaacctttgatgtactgttgttggcactgcttgccatactagcggttgctttatattcggactggatttaaaaacccaagcgctattcgttcgcttgggcttgtgcagctgcttccgctgccatttttttttgctgatctacttcaaatattttaatattgagctgttcaatgtttttcgtcagccagtatgctcgaataaatgactgcatatgttcaagctctgttttactttctttatgctgcctatattgaacgatacactgatacaagggttctggaaacgccaaataactgtgtaaaagcagccgttcctcttctctgagagcaaaatgtttttcatacgtactaaaccactcatagctgtcataggtagttactgggtatgtgcgaagagtacggaaataaaatgagaccaaatcataaatcggtgaagcatcttttgcatgttcaaaattaataaaaaaaccatttccccgttcgtcatagataaaatgtttagccgatagctttccatgagacgtaaccagccggatcttttccttttcttccatttcatcgttccactgatcgagctttccaaaaccaaattcaagcgctcttgtcatttcataataaaatgtacagtagtgcaattcaaacggggacatataaactttcttctcgcattctactacgtactgcttcagctcttcctgacgttttccccacgtttctttcatcgatgtataatgattttctatatcttcttttttcacttctacttcctgcgccgaagcgccgtgaagcttagcaagctcttgaaataatttatgatatcgaatatcacgctcttcggttggattatttgggagccacggcattaagtaatacgagccgctttcatctgaaacaatgggctgagaacgcttcgtctgataaatagggacaaatcccatccatcctttttgatacacgttctgcagcttttgaatgaagttttgatttcgttcttgatgattcgccatttctttaagcgcaaacacgccggttttcgtatagactttttttacttttccgtagtcttcgataaagtcaacatctaagtcatattcttttaacaatactttatagtctgctactgtccgctgcatctatattctccttcctcgtaaaaaataaagaaaacagttaagacattatatgcgtcaaaactgttttctttccgactttaacgaacgggaatatttaagatgcttccttcttccagctcatattcatcttctaaattatttactcgtaaaatgttttgtacattcgtattatagcggtttgctatcgtatcaagcgaatctccgtcttgaacaatacaaagcttccaagttgaaaaagcttcttcttcccgcgaaaagagctttgttaaataaagggcgttttcatttcggccgctttcattttcttctttccgaaattcaacaataatcttttcctcttcttgttcagcttcttcttgctcagcctcttgttgaacgtcagcatacgtattcaattcactagcttgcgattcttcgaagctttcttgctcttgacgaagctgaaacagttcaatcacattgtcttctctttcttcctcgatttgggcctcttttttcacttcgacttcaaatggttcatatgcttcctcttcatattccacgaccggctcagcacgagattcttttttaaatacagatgaaaaataactaggggtctcttctgaatgctcttcttctgaatgctcttcttctgaatgctcttcttcaatagcctctgcttctaaaagtgcgggagcttcacgatagcttacgtcaaactcttgttcctcttgttcttcttcttgagcaacgttttcagtatatacctcttcagcatcgtccacttcttcataggagacgatgtgctgttcctccgaaaactcttcctcttcttctcgttcttcatgctgttcgtacaatcctgtgatggacaagtcagccattagctgcagctgatttgtgcctggcaattcataatcaaataaatcaatagatacatatacgtcttcaatactttgaatacgatttttaggaatggtaatatcaacaggaaattgatgtgataattcagccgttccgtcttcacggacagagatagattgcacttgattctcatttgtatattcgcgtaacgagtgctctccctcgtacgtttcgtattcacctgttaattgtaatgctcctcgaatagacacgtattggtcatattcttgaatagatacttgaggctctaaggagatagacaaaagttgtgagacttcctgtcctttttgaaaccatactgattcttctacggaaaaacgcagacatgataaattatcctgcgacaaattgttctcccccttccaacacccgccaggtaatagcgcggtcattaaagatgtatgaacaaataaattaaaatatgtctttaaaactaaaaaagcttacggaatcctccgtaagccttgatataaaagtcaatcttatttagctgtttatccacgtaacttcgaaaaagctttttcagctgctgcaattgtatgttcaatgtctgcatctgtatgagaagttgataaaaacattccttcgaattgagaaggaggtaaaaatacgccttcattagccatttcacgatagtaagctgcaaaataatctaaattcgatgttttcgctgtttcgtaatttattacctgttcgtttgtaaagaagaaaccaatcattgaaccagctcggtttacggtaaacggcacatcatatttttcagctgctgccatcaatccttcttctaagcgatctgctttacgaatgaactcatcgtaggattgaggtgtcagctgcgttaacgtctcgtatccagctgtcatcgcaagcggattacctgataatgtacctgcttgataaatcgggccgcttggtgcaactcgctccataatttcagctttaccaccgtaagcacctactggtaaaccaccaccgattacttttcctaagcaagttaagtcaggagtaatattgtagtatccctgtgcacagttgtacgctacgcggaaccctgtcattacttcatcaaaaatgagcagtgagccatattctgatgtgatatcacgaagcccttgtaagaaacctggctgagggggtaccacacccatatttcctgctaccggttcaacgattactccggcaatgtcatctccgaattctttaaaagcatattgtacgctttctagatcattgtacggcactgtaatcgtgtttttagcgattccttcaggcactcccggactatctggtaggcctaacgttgcaacgcctgatccagctttaattagaagagagtcaccgtgtccgtggtaacagccttcaaattttaaaattttgttgcgacccgtatagccacgtgctaaacgcagtgcgctcatcgttgcttccgtacctgaactcaccatacggacgatttcgattgaaggaacgcgctcaatcacaaccttagcaagctcattttcaattaatgttggtgcaccaaagcttgtaccagattccgttacttttttgactgcttcaactacttgatcgttggaatgtccgtgaattaaaggtccccatgataagacgtagtcaatatatttgttgccgtcaatatcgtaaatcgtagcgccttttcctcgttccataaaaataggatccatatctactgatttaaatgcacgaacaggactgtttactccacccggcattaattgctgcgcttctaaaaaagctgcttttgacttttcataacttctcatgtgtaagcctccttaattacttgtcagataaccagcgtgctgcgtctttagcatgatacgttacaattaaatccgctcctgcacgcttcatgctaattaatttttcaagaacaatctctttttcatttacccagccgttttgagctgccgctttaatcatcgaatattcaccactcacattataagccactaccggtaaattaaatgtatttttcacatcgcgcataatatctaaataagatagagctggttttacaattaagaaatctgctccttcttctacatcagattccgcttctcgaagtgcttctaagcgattggctgggtccatttgatatgttttacggtctccaaattgaggagaagaatgcgctgcatcgcggaatggtccgtaaaaagcagatgcatatttaacagcataagacatcacaggcacatcttcaaatccagcttcgtctagaccatggcgaatagctgccacaaaaccgtccatcatgtttgaaggcgcaataatatccgctcctgctttagcttgactaaccgctgtacgcgctaataagtcaaggctaggatcgtttaagatttttccgtcttcaattacaccacagtggccatgatctgtgtattgacataagcatgtatctgcgataacaacaaagtctggaaaattttctttaatttgacgaatacctttttgaacaattccgtggtcatggtatgcctgtgagccgaccgcatctttttcagcgggaacaccaaataccatagctgacttgattcctaaatcgactaactcttggatttcatcattcaagtagtctaaagaaatttgatccacacctggcattgattttacagcatttcttttttgttcaccttctacaataaaaataggatatataaagtcttcaggatgtaaatgtgtttcacgtacaagcgcacgcatatttacagaattacgaagacgacgatgacgtgtaaattgtaaatctttcatgttaaaatcctcctttattattcaaaacaactaaccaacatatctatcataccatttattgtgtatgtgttaggaacaagatgcttaattccatattcgctcgctgtctgactggtaataggaccaatgcaaacaactttggttctatttataagctcaagccaattcggaatatctttaattgactcgacaaaaaatttcactgtagaagaacttgtaaaagtaatggcatcaattcctgtttctaaatgttgcttaaccaagcgttcagagtcttgatttcgaatggtctgatatacaactaaatccgttacctcacactcttttaagccatcttttaaaacagagcgggctaattgtcctcgtacaaggagaactcgctcgtgatgtgacacatttgcttttaacgactcaagaagtgattccgccacgtattcttttggaacaagttgcacgttaacatcatgtttttctagcaattttgcggttttttctccaaccgcagccacttttaatctttttaaagcactccaactgatatttaactcttttagccattcaaagaaaaaagaaatgccgttttgacttgtaaaaacaatccaatcaaaacagtcaattgacagcaggacctcttccacttctttttcattgttagaacgtgcgaacgtgaggactggtaagcttaaaggtatgcctccaagctttttaatctgtgctgcaaatgaatgagcctgcttcgcttctcttgtaatcaaaactgttttcaaaaaaagaggagcctcatgactcattatttgtccagctcctcttttacacggtcaattaaaagcttagctccttgagatgttaagcgctcagcagcttctgaaccgatagcaacggggtcttttcccgtaatttgctctttgtaaatcgttttgccatcaggagacgcgactagcgacgttagctcaatgtttccgccgtccaatatacgcccataacccgcaatcggcacttggcatccgccttccatctcttttaaaaatacgcgttcagctctaacagcacgagcggtttcatcatgatttagagcttgaagaagcgataataattcatggtcattttctcggcattcgatagctaaagctccttgtcctacagcgggaacgcttatttccggctctaggtactgagtgaccgtatctctcgaccagcccatacgagataaccctgcagctgccaagataatcgcatcgtaatcttcattttttaatttctctaggcgtgtgtcgatatttcctcgaatccatttaatttcgatatctgaacgcatagatagaagctgtgcccctcgacgcaagctgcttgtcccaatcacagcaccgcttggtagctcctcaaatcgttcaccattttttgaaataagcgcatcacgatgatcttctcgtaaaggaatacatccaatcgttaatccttctggcaaaacagctggcatatctttcatactatgaacggccatatcaatttcttcatctaacatggcttgttcaatttcttttacaaaaagacctttaccgcctactttggacagcgttacatttaaaatttggtccccttttgtaaccatttctttaatttcaaactcaaaaggaagaccttgtttttttaactgttcaatgacccacttggtctgtgttaacgcaagtttgcttcgacgagagccgacaataatttttcgcatgttgtcctcctaattacgaaccccaaaagtgaaaattcgataaactgccaaataaaaagaaattaataagtaagactaggaacaatccaatattccacattgcgattgcctttccttgaatacctctacgcagtctagcatacaagtaagcgctgtatgcaacaaacattaaaaatgaacctaacacttttgtatcgtaccaatgaaaatctacgtatttaatataagcccatatgattcctaagattaacgaaagcaataacagcggtacaccaattaaaattaatacataggacatgtaatctagctttgttaaatcttcaattcttagcaagcgcttgccccacttcttctttttcaataaattatactgaacaagatacagagcggaaaaaacaaaagagactgaaaaagcgccgtaagataaaatagccatggtaatatgaatgattaataattctgacacaaggcgctccgactggacagcagtgtatgtttcaagtggagcaaacgtatgaatagccataattaagaaaccaatcacatttgtaaaaaacaccataaaatcaacgcgaaacaggcgattaatcacaagtgaaagagtaattaagacccacgcgtaaaaatacagcccttcagaaacggtaagaataggaaaccttcccgtctcaaacattcgtaaaattaaaaaggctgtttgcaaaacccacacaatagaaagtaaccagaaggctatcgagtttgccttccggttattttgtacaaaatcaataaaatataataaaacgctcaccgcgtacaaaatcacaatcaattcatagattctggttaattccatatcaaccattattcaatcctcacttaagactgataagctactgaatgagacgtaatcgatgtatgaagctgctcttctttttctttttgcaaagcaacttcctgttcaatattaaaaatcttcatgaacagctctaaagactcttcagcatgtttctctccagccaattctttcgcgtataaaattggatcgcgaagaagttgattaattatactttttgtatgtttatttaaaactttgcgctcgcgctcagataaatctgggagcttacgatcaatgcttttcatcgtttcagcttgaatggtaagtgctttttgacgaagtgcagaaataacaggcacaacgcctaatgtaccaagccaagacttgaaagcaacaatttcagcttcaagcataatttcaatttcatccgcagctttttgacgctcttgcaaattggtttctacaatcccgtttaaatcgtcgatatcatataaaaagaccgtctctagctcatctagttctggatctaagtcacgtggaacggcgatgtctaccataaacaatggacgacctttacgcgtacgctcggcttcactcatcatttgtttcgttactacatagtcattagcccctgttgaactaattaagatatctgcttcgcttaaagcatgttgaagatcagcaaatggtttggcttctccagaaaaacggtttgctagctcttgtgccttttcaaatgttcgattcactaccgttacttttttagctccgctgccatataaattctgtacggcaagctgacccatttttcccgcaccaagaatcaacacatgtttggacgataaatctccaaaaatctttttagcaagctctacggctgcatagctgacagaaactgcatttgcaccaatttctgtttcatgatgagcttttttggctaatgtcacagcttgtttaaacagctgattaaaaaccgttccaattgtttcttcttcttgagcaagcaaaaagcttgaacgcacttgtccaagaatttgtgtttcaccaatcaccattgaatctaatccacatgctactcggtataaatgttcgatggctccatcattttcatagatggttaaataaggcgaaaactcttctttatctattccgaaccattcagctaaaaatgcttttacataataacggcccgtgtgtaattgatcaacaacagcataaatttccgtacgattgcatgttgaaacaatgatgttttccaaaatacttttttggccgcttaacgttttcatggcagatgctagttcttgctcattaaaactaagcttttctcttatttcaacaggggctgttcgaaagtttaagccgactgctataatatgcatttgtacataccccctataattgaaatgtgcttatttatccgaatttgacgggcagtaacccctaaattcccaaagagctacagtgagataactgcccgtaaaatccggcgttcttcattctactattcgtaaaaagcggcgtacattacacaggtgtaagcttcgccttatctctaactattataacatgttctataagtcattcgaaaaaaaaatgtgaacagtctttgaaaacatgtgttaagatattaactgttattccgtaataaattgtatcaaaaaagcagcgttttatcacgttttctgttttgaaacacctggaggttactatgaaaaagcaatcaatgttttttggtgtcttactagttggatttggaatctttttcttactgaatgaactacatatgagcattgcagcaaaggtatacacgtggcctgtactgttaattttaataggagcagccctgttaactgagtctgctttatctcaagatcattcaaacttgcttgcaagctacatattaatcactttaggtattcatttctatgtaagtgaacaaattcccttttggcctacgaatattagcatggtcgtttttatggtggccattagctttttacttagtgctagaaaagccaaatcaggctttttccaaggcggcacccttttaattattgccattttaatgatgttttcagaccgtcttaaactatttttgccaaaagttgaagacggcgtaaattatttaacaaccttctggcctattttattgttactagttgggctatatttattatttttcaaacgaaagtaatctatgtaaacaagttaaaaaaatggaacgtttgactcacttcctgttagagtgatgataaacgttccatttttttagcttctattcctttgtttagtgagtcatgcgatactgcaaagatttccacgctttatcttttccttcacctgtttcagatgagaaatgaattaattcatcatttggatccaagtccagcgtttctctcactacttttaagtgcttttgccatttccctttaggaattttatcagctttcgtcgcgataaccataacgggaaggtcatggtgcttcaaaaactcatacatcataacgtcatcctttgaaggtgcatggcgtagatcaacaatcattaacacagctttaagctgctcacgatttgttaaatacgtttcaatcattttcccccatgcttcacgctcttttttagacacttttgcaaatccgtagccaggtacgtctacaaagtgaaggatttcattaattaaaaagaagttaagcgtttgagtttttccaggcttagacgacgtacgcgctaagcttttgcgattgagcatcttattaataaaagatgattttcctacatttgaacggcctgctaacgcaaactctggcaggttttctttaggatattgttcagggcgtacagcactgatgacaatatcggcttgagttactttcattttacctctcctactagcgcatgttccaatacttggtccacatgtgacacaagaacgatgtctaattcctcttgtacactgtcagggatatcttcaatatcacgttcattatcatgagggattaatattttagttaatccggcacgatgtgcactaagtgacttttcttttaaaccgccgattggtaatacgcgacctcttagtgtaatttctcctgtcattcctacttctctacgcaccggtttacccgttagtgctgatactagagcagtggcaatggtaattcctgcagaaggtccatcctttggtacagctccttctggaacatggatatgaatatcatgtttttcataaaacttttcatcaattcctagtttctctgcatttgaacgcacgtagctaaatgctgcctgagctgattctttcatcacgtctccaagctttccagttagcactagtcttcctttaccaggggacaagcttacttcaatggctagcgtgtctcctcctacagttgtgtaagcaagacctgtagcaacgccgacttgatcttccgtctcagcctgtccgtaacggaacctaggcttaccaaggaattcttcaagcgttttggccgtcaccaccacgcgttttttctcgccagagactacgatacgagctgcttttcgacaaatggaagcaatttcgcgttcaaggttacgaacaccagcttctctcgtatataaacggatgattgctgttaatgcgtcatcacgaatctgcaaattgcccttttgcaatccgtgattttctagctggcgcagcaataggtgacgcttcgcgatttcaagcttttccagctccgtgtaaccagcaatttgaataatttccattcgatcgcgcagcggccctggaatcgtagctaagttattagctgtagccacgaacatcacttttgataaatcatacgtttcttctatatagtgatcgctgaaattatggttttgttcaggatccaatacttctaacaaagcagaagatgggtctccacggaaatcatttgacattttatcgatttcatcaagcagaaataccggattaatcgttcccgcttttttcattccttgaataatgcgtccaggcatagctcccacgtacgtgcgacgatgaccgcggatttctgactcatctctcacgccgcctagagacactcgtacaaaatgacgatctagagacgtagcaattgaacgggctagggatgttttccctacgccaggaggtcctgctaaacataaaataggacctttaagagattttgtcaactgctgcacagctagatattctaatacgcgttccttcactttttcaaggccatagtgctcatcgttcagcacttgttcagcattatgaatattgagcgtatcttccgtttcatttgtccaaggtagcgcaatcaaccactcgatataatttcgaatgactgagctttcagcggaggtagcaggaattttttcatagcgatccaattctttaaacgccacttgtttgacgtggtccgtcatcccacttgcttcaattttttcgcgaagtgttgctacctctcccgtctttccttctttgtctccaagctctttttgaatcgccttcatttgctcacgaagataatactctttctgagtgcgttccattgatttctttacacgctgtccaatttttttctccagctgcaaaacttcttgctcgtcttgaatatgagaaatgatcgtatttaatctttctttcacatcagttatttctaaaatttcttgtttaagctgaatttttattggtaaatgagaggctacaatatccgctaatcttcctggttcttcaatatcgcttacggttgaaagagtttcaacggacacctttttggaaagttttatgtattgttcgaaatagtctaaaagcgtgcgcatcagcgctttatcttctacatcaacctgatgttcttcgttttgcttttccacgtgcacaacaaaatattcttcactatcttcaaattctgtaacggttacgcgatttagtccttctactaagacgcgcatcgttccatttggcaactttagcatttgtttaatttttgctaacgtaccggttctatataaatcctcttttgttggttcatcgatacccatatctttttgtgatactaaacaaactaagtgatcatccatcattgctttttctaatgcttgcacagatttatctcgcccaacatctaaatgaagcaccattgtcggatagacgatcaaacctcgtaaaggcaatagcggcattgtcaatttttctttttctgccatgcaatgaacacctccaatgctcgtcaattaaagtatgtaaagtgtgaattcttttaacaattttatctcatttgtatacacatgtctaacaatagtaattactaattgtaccatgagaaagaattaaaaggcaaaatatatctttttaagctcttttcataaaaaaacgcctttttcgttggctgtgtataaaggttttatacgcgaaaaaggcgatgaatattcatctgaccattaatttttaattatcatgatagaattagctagattctctagttgaaatagctggatctaccgacaaatgtgcaacatgctcatgtacagacaatagcgcttgttcaaacacctctgttaaatgatggacaggaataatatcgataccttttaccttttctaccattgcattcatattttcctttggtacaatcaccgtctgaacgcctgcttgttttgctgccttgatttttggaatcacaccgccaattggctttacgttaccgtgcagaccaatttctcctgtcattgctaccgtatgtttaattggcacttcataaatcgctgagtagatacctgttgccatcgcaataccagcagaaggcccatcaattggcacgccccccggaaagtttacatgaatatcatactcatcggctggaacatccatggaacgaagaaccgttatgacattttcaattgagcttttagccatacttttacggcgaatagacttcccttgagtccctatactttcctcttcaacgatacctgtaataataatgttccctttctcttttgcaggaatcgctttgacttcaatttctaaaagtgctccagagttgggcccgtacactgctaatccattaataagtcccactttttcctcatctgcaattttcggatcgtgccttggagatagttgactagaatgaacaatccattcaatatcttcatttttaatgtccgttcgttcctctgatatcgctaatccagccgcaatttgcatcatattaaccgtttcacgtccattgcgtgcatatgtagaaaacagagataaaccttcttctgatatatccattcttactttatttgctgctttttttgcaactgtaataatttcgtcgcgatcaagctcacggaaaaatacctctacgcacctggaacggatggcaggcggaatttcattaggcgttctagtcgtcgcaccaatcaaacgaaagtctgctggcaacccattttgaaaaatatcgtgaatatgtgttgggatttgtgtgttttcttcgctgtaataggcgctttccataaacacttttcgatcttctagaacctttaacagcttattcatctgaataggatggagctctccaatttcatcaataaataaaattcccccgtgtgcatctgtaaccgctccttgttttggctgcggaattccagcttggcccatggcacctgctccttggtaaataggatcatgaacagacccaatcaaaggatcagcaatgcctcgctcatcaaaacgcgccgtagttgcatctaactctacaaatacagccgattgtttgaaaggtgattttttatttttttttgcttcttctaacactaaacgtgctgctgcggtttttcctactccaggcggcccgtatacaatcacgtgctgtggattaggaccgcaaagggcagcctttagtgaccgaattccatcctcttgtccgacaatatcggagaagctagacggcctcacacgttcggcaagcggctcagttaaagagatggctctcattttctgcaattgctccatttctttctttgaatcccggtcaattgagactttttgcgtacgctgattgcgtaataaattccaaaaatataagccaatgatgataccaaaaaagagttggaccattaaggcaatattcgtccagttcatagataaacctcctgcgcagtttagtaagataattatcagttattatctccctgcagcagtaggaataaacaagattctagtaaaaagtaaaatttagttgtgcttcatcaccagaaaaaagccgggtactcaaattgagtacccggctttttttatgctgatgttttgctgccttcttgaatagtagatccgtcttctaatacgaacttaggagccgcttgatcacgaacagtttcacctgtgataatacattttgtaatatcatcacgtgaaggaagatcaaacattacatctaacataataccttcaatgattgaacgtagaccacgagcacctgttttacgctcgattgcttttttagaaatttctactaaagcctcgtcttcgaactcaagttcaacgtcatcaagttcaagcattttttgatattgtttcactagtgcatttttcggttttgttaaaatctcaactagcgcttcttcatcaagaggcactaagctagcagtaaccggtaaacgaccaataaactctggaattaaaccaaattttaataaatcttccggtaatacttttgctagtaactctttttctgtaaagtcttgttgttttgtttctgaaccgaaaccaattacttttttacctagacggcgcttaataataggttcgattccgtcaaatgcaccaccgcaaataaataagatatttgttgtatcaatttgaataaattcttgatgagggtgtttacgtccaccttgaggaggaacgcttgctacagtaccttctaagattttaagaagagcctgctgcacaccttcacctgatacatcacgtgtaatagatgggttttcagacttacgcgctactttatcaatttcatcgatgtagatgatacctttttcagctttctccacatcgtaatcagctgattgaattaattttaataagatgttttcaacatcttctcctacataacccgtttctgttagagatgttgcatctgcaatcgcaaacggtacgtttaaaatacgagccaatgtttgagctagtaaagttttaccacttcctgtaggtccaattaatgcaatattactttttgataactcaacgtcatcaattttgctgtttgaattgattcgtttgtaatggttgtataccgcaacggataacgattttttcgcatcctcttgaccaattacatactcatctaaaatgtcacgaatttcttttggttttggtacatctttaaattctacttcttcttctgtacctaactcttcttctacgatttccgtgcaaagttcaatacattcatcgcatatgtaaacacctggacccgcaactaacttgcgtacttgttcttgtgttttaccacaaaatgagcattttaactgccctttttcatcgttaaatttaaacataattttcaccccttgtagtatttactaaagtgctcgaagctgatttctatccgcgctatagcccaaccacatgaacaactcatctatttgtaggtaaatgcccctctttattacatagtaaaagcgctatgaaaagatttgtattgcattttaccatacattttcttgaatagatactaaaacgttttatgtatatgttgttgatgagcataacagaatggagatctgctattatatagtgtcctcttattgggcctatttcataaccacggatttcaaacaatgggttaaagctgcttctacggtgttggttatgatataaaaaaactattgaagtttataaaacaaggcacgatcaagtcgcgccttgtttcttacttactattatgcaacagctttgctgttttctacaagaaattcaactgctttacgtactttcatgtcttctttaatgctatcaagactgccaagcactttcttaatttcttcgacaggcatgttgtacattcctgccatgttttctaattctttttctacttcttcttcgcttacttcaagattttcagcttttgaaatagcttctagcgttaagttgattttcacacgcttttcagcatccggacgcatttggtcgcgaagagctttttcatcttgacctgagaattggaagtaaagttcaaggttaagaccttgcatttgtaaacgttgttcaaactcttgcatcatacgatccatttcagtgttgaacattgcttctggaatttctacttcagcgttttcagcagctttttctactaaagtgtcgcgaagagctgattccgcttgattctctttatcgctttgtaatttttcttttgtttttgcttttaacgcttctaaagtttctacttcttcatctacgtcttttgcaaactcatcgtctaaagctggaagctctttagatttgatttcgtgtaatttcactttgaatttagcagctttaccagctagctcttcagcgtgatactcttcagggaatgttacttccacttctttttcagcgcctacttcaagaccaactagttgctcttcaaagccagggatgaatgtgttagaaccgatttctaaagaatagttttcgccttttccgccttcgaatgcttcgccatcaacgaaaccttcaaagtcgattacagctgtatcaccttcagctacagttccttcttctttaacaactagttcagcgtgacgctcttgaagtgtttttaattcagcttcaacgtcttcatctgttacagttgtatctactttttctacttctaagtttttgtattcgcctaatttaacttcaggcttaacagttactttagcagtgaaaactagaggttgtcctttttcgattgtttcaacatcgatttctggacgatcaaccggctcgataccagcttcaacaattgcattgctgtaagcttcaggtaataagatgtctagtgcatcttgatataaagattctacgccaaaacgtttttcgaaaagtggacgaggcattttacctttacggaaccctggtacgtttacttgttttacaacttttgtgaatgctttatctaaggctttatcaaactcagcagcttcaacttctactgttaaaacgccttgatttccttcttgtttttcccattttgcagacatgaatgtttccctccaaaatcattttaagtagtgatttctaaactagataatgcagatagcctatcagttcaaccctcaatcattatctatttaactccctattactttaaagtaagtaggaatgtaatgtaaagatgaaattctactatacgtatttaagtgcattttacaaccattatattataacatacaacaatgacgtttcaactaaacaccacattttatataaaagaaatttcttcaatttcttttagctctttaattgcctttcttaattcagctgcggagaaacttccgtcttcctctgctacagctgcatctgactcttctccttgcatcatcagactaacagcatacaccgctgccgtccaaagttttacattatcacccggtaaaaacggaaatgtaataaataaatgacgctgccatatttcaacggcaacctgcaacaatgtaggattttcatgctccagcttttccgtcagctgtgcttctacttgctcggcaaacaaatacggtgttgttcgttgaagctgaagcgcatttacttttttcgtctctccaaacttagtaatcataaaatcaatgtctacttcttcttccataactgtttttaaagcgactgtttttacgatagggtgaacagcttcagatgaaaatagctgttccagaaagacgcgctgcttttcaattctctttgtttttaatgaatgaacccattcaagctgatcctgaatattgtctagagctgtgaatgatttaaactgctctagctgttcttcttctgtttgttcttctatgacttgttcttgattcattctattcttgcagaactccaacagctgataaagctgttcagcatgttcagaagggagtttgtgttcttgaataactgcttgtagagtgacatatccttcatgatagtgaccaagctgaattaacaccatgaggtacatttgcaaattatgataataatcgccaatatcttctttcagcatttgctcacataattctttagctatgcctgcatcaccgagctccacgtgacaaataacaaggccaagcaagatttcatgatgcttattatcaagttcgtaggcctgctcaaataaaggaagtgcttcttgaaattgcttgtgctgcatatgatctgtagctttttcaaccaaccgttcttttaatagaggaaaagctacaattttgttttgttgttcattcgacatgttttctccccacttcgcggtccatttgctttacagtttagcaattcggttaacggaacgcaaaaaaatcgagcaaaatcataattttgctcgatttttggttaatatcttaccgtttttgcttcataagcagaaatgtcgtcttcaaaagaaagcgtatagccaatttcatcatatccgttaacaagcatatatttccaatgaccattgatatcaaacgtacgttcaaaacctgcttcatcggtaattttttgctgatgaagatcgattgtacaggcgtaagaagcactttgagactctttcattaaataggaaacatcttcttttggtaaaacaataggtaaaataccattttttagacagttttgtttaaaaatatccgcaaatgaaggtgcgataatagcacgaaacccgtagtctaaaagcgcccatggcgcgtgttcacgtgacgaaccacatccgaagttctcgtcagctacaagaattgttgctccttgattttgaggctgatttaattcaaacgtttcatttaacgtctcatcttcattatatcgccaatcaaaaaatagaaattggccaaagccagtacgctcaattcttttcaaaaattgctttgggataatttgatcagtatctacgtttgctcggtcgagacctgctactttccctgtatggattgtaaaagcattcatctgtgttctcctccttatcgcaccgcttgttcttgtagtttgcgtacatcaacaaaatgtccatataccgctgccgctgctgccattaccgggcttactaaatgcgttctggcgccttttccttgacgtccttcaaaattccggttagaagtggacgcacagtgttcgccttgtggaactaagtcagagttcatgcctagacacatgctgcagcctgagtctctccaatcaaaacctgcttcaataaaaatagcagataacccttcttcttcagccactcgctttactttttgagaacctggtacaatgatcgctcgcacatctggtgacactttctttcctttaataaaggctgccacgtcacgaagatcagacaaacgagcattcgtacatgaaccgataaatacatgctgaactggaatctcttctattgccataccaggctgtaagcccatatactcaagtgctcgtgacaaagactttctctcagcttctgttttacactcttctaatgtaggaacttgcttgctaacataagaactcatcgccgggtttgttccccatgttacaacaggttcaattgtatctgcatcaatttccagcgtttcatcgtacgttgcaccttcatctgttgctaaagctgcccaagcttccactgctttttcaaactgttctcctttaggagcatactgacgtcctttaatataagagaacgtgacatcgtctggactgattaaaccagcttttgcaccggcttcaatagacatattacaaatggtcatgcgctcttccattgaaagatcgcgaatacattcgcccgtaaattccacgattgaacccgttccaaaattcacaccgaatttttgaattattgctaacacaatgtccttagcataaacgccaggctgctttttgccattcactttcacttgtagcgtttttggtttcgcttgccatagcgtttgtgttgctaaaacatgctctacctcactagttcctatcccaaaagcaagcgctccaaatgcaccgtgagtagatgtatgactatctccgcacacaatggtttttccaggctgagttaatcctaattccggtccaatgatatgcacaattccttgctcttcacttgttaaatctaaaagcttcacaccaaactcatgacagttttcagatagtttgtctacttgtttctttgcaatcggatctttaatattaaaacggtcaactgttggaatgttgtgatccattgtagcaaacgttaagtctggacgcttcacttggcgatttgccacgcgaagaccttcaaatgcttgaggagacgttacttcatgaataagatgaagatcgatatataataagtccggcttcccctcttctcgacgtacaacatgttgttcccaaagcttatcaataattgtttttggtttcatactgctcctcctttctgattatgaaaaacgtttctcacaaaacgtgagaaacgcatgattaactgtaagctgtcataatgcttgaaatggcagaatcattggcaattaccgcagttatcgcctccaccattttatcggtacctaaataatgattaccgtctgctaagtcagctgttcgatgacctgcatgtaatacactttcaaccgcttgttcaatcactgctgcttctttttctaatccaaacgaatgtctaagcaacattgctgcagataaaatagcggcaatcggattagctttgttttgaccagcaatatctggtgcagaaccgtgaaccggttcgtatagagacggaccatcagccgttaagctcgcagatggcaacattcctaacgatcctgtcagcatagaagcctcatcactcaaaatatcaccaaacatattttcagttaccactacatcaaaatacttcggattacgaattaactgcatagcagctgaatctacaagcatatgctcaagctctacatccgggtagtcttttgctacttcttcagctacttcacgccacactctactagactcaagcacattcgctttatcaacagacgttacttttttacgtcgatttacagccgtgtcaaatgcttggcgaataattctttctatttctgtacgcttataaaataatgtgtcgacaactgtttcttcatttccttctgttcggcgctcgctaggcttaccaaaatataagcctcctgttagctcacggacgataatgaagtcaacaccttcaatgtattcttttttcagaggagaggcatccgctaagctatcataaaacgtcactggacgaagattagcatataaatccagttcttttcgaatagctagcaaacctttttccggtcgcaaatgtgaagggttacgatcccattttggccctcccaccgatccaagtaatacagcatccgcctgcttacaagtctcaattgtactttctggaagaggtgtgcccgcttcatcaattgcagctccgccaattagtccatacgtaaactcaaattgatgatcaaagcgctctccaattgcttttaaaacggcaacagcgcctttggttacttctgttcctacgccgtcacccggtaatacagcgactttttttgtcatggtggtctctcccttcagttcacattacttcttgctttgtacgatgctgctgaatagcgattaaacgattaatggcgttcagatatgctttcgctgacgattctaatacgtcaaatgctactccgcgtccgcttgcttcagttccttcactttcaaccttcacaaatacttcagccagtgcatccggcccaccgttaatagactgaatacgatagtctaatagttttacatcttgttcaacacagcgctgcagcgtattatagatagcttccacgcttccagatccggtagctgcttcttgaatctcttcgccattttctttgcgaagcgtaatcgtagccgttggaatattgttcgtaccatactgaacttgcagactttcaagcttatattcactttctttgctaacttgcttttgaatgactaatgccaataaatcatcatcggtaatgtcttttttcttatctgctaagtctttaaacttctcaaaaagcacgtttgcttctgtatcttccaatgtgaatccaagctctactaagcgtgtacggaacgcatgacggcctgagtgtttaccaagcacaattggattttgtttaacacccacaagttctggggaaataatctcatatgttaacggattttttaagacgccatcttggtgaatacctgattcatgagcaaaagcattttttccgacaattgctttatttggtgcaatattcatcccggtaagcttactgataatgtcactcgtacgcttgatttcaggcaagataagacctgtgctcgcttgatagaaatcttgacggacatgaagcgcaagtgctacttcttcaagagctgcgttacccgcacgttctccgattccgttaatcgttccttcaatttgagtagctcctgcttcaatcgcagccattgaattggccacagctagccctaagtcatcgtgacagtgagctgacaaatcaactttatgaatatttgacacatgttcttttaagtaattaaatactgattgatagtcaccaggagtgataaatcctactgtatctggaatattaacgacttttgcaccagcatcaataactgcttctacaattctagctaaaaacggtaaatctgttcgacatgcatcttcagcagaccattgaacaactgggaatttttcacttgcgtatttcaccatttccactgctgtttcaagtacttcatcaggtgtttttttcaatttatgctgcatatgaatttcggaagtagcgataaaaacatgcagtcttggttctgcactttcttttaacgcttcccatgcaatgtcaatatcttttgtaacagaccttgcaagacctgttacagaagaatttttgacaatagacgcaatttcttttacggattgaaaatcaccttttgaagaagcgggaaatccggcttcaatgatgtcgatacctaatcgctctaactgcttagcaatttcaagcttttcttgtaggttcaaattgactccaggtgactgttcaccatcgcgtagcgtcgtgtcaaatagtttaattttttgcactagcgatcaccgcttctttcttttgttttttaacaaatggcatcatttcacgtaattgagcgccaactttttcaattaaatgttcattttcacggttattgatagcagtaaattctggacgatttgcttggttttctaagatccagccttttgcaaatttacctgtttggatatcttcaagcacttttttcatttgttcttttgaacgctcatctacaacgcgtggtcctgaaacgaagtcaccccattgagctgtatcagagattgaataacgcatgccttccattccgccttcatacataaggtcaacaattaattttaattcgtgtaagcactcaaaatatgcaacttccggttggtagccagcttctacaagcgtttcaaaaccagctttaactaatgaagttaaaccaccacaaagtactgcttgctcaccgaaaagatctgtttctgtttcttctttaaatgttgtttctaatacacccgcacgagctgaaccgattgctttagcataagctaacgctacgtcttttgcttctccagttacatcttggaatactgcgaataacgccggtacaccagctccttcttcatacgttcttcttacaaggtgaccagggccttttggagctactaagaatacgtcaacaaattcaggtgctacgatttggttaaagtgaatgttgaaaccgtgagcaaatactaaagattttcctggttttagtcctggaagaatttcttcgttataaacttttggctgatactcatctggaagtaataccattactacttctgcttgttgaactgcatcttttacagataatacagtgaaaccgtcttgctctgcttggtcccatgatttacctttacgtaatcctactaccacgtttactccgctgtcgcgtaagttttgtgcatgggcgtgaccttgtgagccataacctacgattgctactgttttaccttgtaataattgatcctttgcatctccgttataatatacctttgtcataataaatctctcctcttagtttatatagttttatatagtttacttggttagtaactagctagaattaaatgattgatgaaagtttggccgctgctttttgcgtaccacgcggaacagctactgtgcccgtgcgcgttacttcttttaatccataaggctgaagcagatcaatcatcgcttcaatcttgctggattcacctgttacttgaataattaagctgtcgcggcttacatcaatgatggttgcacggaaaggttcaattactgcataaagttcgttacggctcgctggggtagaggctactttcattaaagcaagctctcttgataccaccgcttgatccgtaatatcttgaaccttcaacacgtcaatctgcttatttaactgcttaatcacttgttcagcagcgttatcatgctctacgttcacaacaaacgtcatgcgtgatacatcttcagattcagtgtgacctaccgaaatactctcaatattgaaatttctttttgtaaataaccccgtcacgcgatttaatacgcccgcacggtttaatacagttgctgtaataattcgcttcatggtttcacccccaccatttcatgtaatccttttccaggtgcaaccattggatatacgttttctttaggtgcgacaaagaaatttagtagaacaggtccatctgtttccattgcttctttcaaagccgcatgcgcttcttcttcagtagaagcttgtaaacctttgatatcataagcttctgcaagcttcattaaattaggctgattcggaattaaagagtgtgagtagcgttcttcatagaagatttcctgccactgacgaaccataccaagcgactgattgttaagtacaaccacttttacaggtaaatttaattctctaataactcctaattcttgaagcgtcatttgaaatccaccgtcaccaacgactgctacaactgttttatctttgtttgctagctgagcgccgattgcagaaggtaatccaaagcccatggtgccaagaccacctgaagttacccatcgatctggattattaaatgtgtagtattgagctacccacatttgatgttgcccaacgtccgttgtaaccacggcatctccatttgtatacttgtgaagcaactcaactactttttgtggttttaacacgtccgctgagttctgataccataatggatattcttgcttccacgccgctaatttctcatgccatttcgtataatctccaacttctccttcttgcagaagcaattgcttcaatacttcttttgcatctccaacaattggaatcttggttggaacattctttccaatttccgctgggtcgatgtcaatgtgagcaatttttgcatttggtgcaaaatgctttaagttacctgttactcggtcatcaaagcgtgcaccgatactaatgagaaggtcactctcataaattgccatgtttgctgtgtacgttccgtgcatgccagccattcccaaatgaagcggatgatctgcaggaaaacagcccaatcctaaaagcgtattaataacgggaatattttgacgctcagcataattttttaattcttctgaacctttactcaataacactcccgcacctgctaagataacaggttgttttgcagctgctactgcgtctgttaattttttaacctgcagctgatttggaaaataagttggctgatagccaggtaaatcaatttctccttcgtaattaaatgttccatcaccctgtgccatatcttttggaatgtcgattaagactggaccaggtcttcctgttgtcgcaatatgaaatgcctctttgatgattcttggcatatcgctgatattgcgtacttgatagctatgttttgtaattggcattgtgatccctaatacatctgcttcttggaacgcgtcagaaccaattacacttgaagctacttgaccagtaaaaacaactaaaggaagtgagtcaatcatcgcatctgccaaacctgttacgatatttgttgcaccaggaccacttgttgcgataactacaccgggtttgcctgaaattcttgcgtacccttctgctgcgtgaattccaccttgttcgtgacgagcaagtacgtgaaacattcctgaaccatatagcttatcgtaaatcggtaaaacggctccccctgggtaaccgaagatgacgtcaacattttctcttcttagagattcaatcaacatgtcagctccattcatttttgccccagtgcttacaggttctttcgtttgcatattggctcccacttttctcatcctttcgttttctagataaaagaaaaaagacttctcacccctaaatagaccctatcaaatgatataggtcaaggggcgaaaagtcttttgtactttacgcggtaccaccctcgtttgtaatcgtaatgattaccttatgaatgtatactgtacattctttttgataacgagtgctttggaagtacactcggtcacccttactgaatttcagggtgacactctgaggtgagttcattttgagttggtaacgtcggcttccagcaacccgactctctgttgatacctaaacatcaaaactacttatcctcttcaacgttttaaaacgctatatgctttttgaacaatgctttacacatcatattttaaattaattacaattaattaaaatttttagaaaacttatatttgaggactatcttacgcccatttctatgcatagtcaaccacttttcaagatttttttagacaatttagactaaacagaatatttgaatgcgttttcattattgatgtaataagggtttacagcagttaaaaaagtttttctgaaacgttcatttgtacacactgaatgaacaaacattcacttttaagataaaaaaaaaaaaaaaacggtttttactttttagtaaaaaccgttttttttggacgtcccaggagagattcgaactcccgaccgacggcttagaaggccgttgctctatcctgctgagctactgggacataatgttaaagtgtatcaaagacaatacttattatattcaaatataatttaaaagtcaacgtttttttgaaattttatgagaagagaggtaaaaaaccttctcttctccctatatttggctatattatgctgaaagtgtacaggttaactgcatgctaggaatatgtttaccgcttatatcgtaaaactgcacggtagcttctgtaccatccattactagtatagcatacgtacgttcttttctcatacgaggaagtaacatacttcctggattgataaataaaactccgtccatgagctcagctcccgctatgtgagaatgcccaaaacaaaccacgtttgccccaacttctctcgctttgtaatgcagattcatcatagacattttaacattatataagtgaccgtgtgtaaccagacacgtagcttctccaagcgactctactcgatcattaacgtaagatgcatcgtagtcacaatttcctcgaacgcctaaaaatgcagacatttctttgctgtcttgcggcaactcagagtccccacaatggatcatcttatctacatcagcatgtctctctctgatagtgagtagctcttcttgtaacccgtggctatcgcttacaattaatagtttcacacgtcatcactccttctaaaattgcgcatcaattagcggtgctagtctttttaacgcatttgctcggtgactaatctgatttttttgctctttggtcaattctgccatggagcatctccatttttctacaaagaaaatgggatcgtacccaaaaccgttttcccctcttttttcctccaagatgtgcccttcacacgtgccttctacaatttcggttctctttccaggcactgcaatagcaagagcacaatgaaagcgtgccgtgcgcttttcaaacggcacgtcatttaatttttgaagtaccttctctatattagcattatcatctttattttcaccagcataacgcgcggaataaacgcctggctccccgtttaaggcatcaatagcaagccccgaatcatcggcaatgaccggcttatttaatgcggatgaaatggcctctgcttttagcgtggcattctctgcaaatgtaacgcccgtttcttccacgtcttcaatctcaggaaaatcaagaagcgattttactttaaatcccttcggtgagaaaagtgtttcaaaatcttttactttgcctgcgtttttagttgcaataatgatttcacgcacgttaatcccttacctttctttaaccggaatgtaggcagccaggtgatcaagaacttccttttgctgttcaatcaattgataaacacccttttcccctaaatctagaagatggtttaactgttctctcgaaaacgtcgattcctctcccgttccctgtaattctacaaactgtccgcttcctgtcatcacaatattcatgtcaacttccgctgtcgaatcttcttcataatttaaatctaaaatcgaattttctccatgaatacctactgaagtcgcagctaagtagtcacgaataggaatttctgttagcttgttctcttcaaccagctttccaaacgctaaaaccatagccacaaaagcacctgtaatcgatgctgttcttgtgccgccatctgcttgaataacatcacaatcaatccaaattgtcttttctccgaccttttccagatcgactacagaacgaagagctcgtccgattagacgctgaatttccattgttcgtcctgtgactttaccttttgatgattcacgtatatttctttgtgccgtagctcgaggcagcatagaatattcagctgtaatccatccttttccttgcccacgcataaaaggaggcactctgtcgtctatgcttgctgtacaaataacctttgtgtctcccaccgagattaatacagatccttctggatgctttaagtatgaagtatgaagagatacagatctcaattcattaaattccctaccgtccaaacgcattaagcatgtcctcctattcattcatttatatgtaatagtctcttccattttaactataaaacagcggaaagaggtcgctatttcagcagacctctttctacttagtcctttactagtataacaaaaatttgtttttaaaaactacctgtgttcacatttttaggtcttgaaactggttccgttaattttttccctttttcatcttttagcgtttttttgccattcaccttaatggcaacgctgtctacggctttttgttccgtcagagataacactaaggagtcgagaacatgctgagaaatttccgttccttttaaattcccaaagatgtttttattaaagttcagcgttaactcaccgtccgcatactttggagctgctacgagctttgcatcaggattaaagtctgtcactaaacctgatgcaggcgcaggtccttctacaagctcgttcacaattgcagtgtacatatctttgtcatcagaagcaattcgttttgtgacaggaacatagtaagtttgtttgccctcttgagctaagtaataaatcgtaactggcttcgtttgagttacgtcaactactccagtattatcaaagttaatgccatctgctctgctcaaccctttactgattggcgtatgatttacaggcatctcatctttatcatagccgttaatgcgaattttaactttatttacgccttcaaactgcgtcagcgtccaagtgacggcctgcagaatacggagttcatcttcttttttatactcagcaaattcaggtgaaaaatctgctaccatcgtaccgtcactttccagctttgtccctaaaactcttgtatcagcaggaagaaccgctcggaaattatttggcaataagtttgtgaccggtccaccctctactaaatattcaagagactgtttagcgacaccttttgatttaggaatttcaagcgtctggggaacaacgtacccgtttttatcaattaagtagagttctcttttggtaggcgcagatgtttctgcggctttactttgttttttattagcttccgttactttcgcttcagtcgctaatgatttttcatctttcacataggtgacatcctttggcggatcaatttcctttgctgcgttatcccctccgaaaagtccacagccggataacaatacagacgtggtcaccacggcggatatgagaacaaattgggtctttttggacattcctttccctcctcagactgtttgtactactatgtatacgagcttttttgcattttagaccagctcaaaaaagtttttgtccgcaaaaaaaaccgagcatgatatgcacggttttaaagcttgatatgttcaacattatatacagggtgctcaaaccatttagatgcaatagattgaaacagttctgttgatcctgttgtaaagaagtagtgttcaggctccatgtttctaggagctagtaaattgctataagaaagaatggcacttacctctattgccgtttcttcgccagaactgattaactgaactctaggcccaattgcttcttgaataactggctttaataacggataatgcgtacatcctaaaataagggtatccatatctgtatgataaaaaggttttaatgtttcttttacaattcgctgtgcttccggtccttcataattaccgctctctacaagaggtacaaacaaagggcatgctaaattttccacttccactctcgtatgaagagcgcggagtgcatgtgtataggcttgacttttcacggttccgtttgtgccgattacgcctattttatgatttttagttactttaagcgcagcgcgtgatcctggttcaatgacgcctataacgggaatatcgagctgttcttgaatttcatccagcacaactgccgtagccgtattacacgcaataaccagcattttaatatctttagctattaaataattagtcatttcccatgtgaaagctcgtacttcttcactaggacggggaccgtatgggcagcgggctgtatctccaatgtacataatttgttctttcggaagctgtctcataatttcctttgctaccgttaatccgcccacacctgaatctataacaccaattggtctactcaaaacaatcgcctcatttttctttcatttcatcatgcaattttcgtaacgttactcgtaaaacttccgtttcactaggggagaagtttgccagtacgccatttaaatacgtttgtcgcttttcaatcacttcttcgataacacgtgctccttcaggaagcaaatgaatacgcactacgcggcggtcttttggatctttcacccgaaccaccaacttatttttttccatacgatctactaaatctgtcgttgtactacaagcgagaaaaatacgatttgataaatcgccaatcgtcatatctccacgttcaaacagccactgcaaagcaataaactgaggtggcgtaatcgtataatcttctaaaatttctcttcctttttgcttcacaatcgctgcaatatgtcgaagtgacttttctaattctgccactgtatcctcattattttttgctgtcataccgtaatcctttccacctataagtcttattttctattatttctttcagttaaacccgtctctactgtttctcttttctattttatattgtgctcttttttcggtgatttttcaaggttaacatgaggattctacgacgttcatcataagtctacatactctcattcagcatcaaaaaacagctgctccctaaaaggagcagctgtttctattaattattgatatacagctcgaaaactgagctgaaatcttttgttgtatagactgtttttttatctaataaccaagaaaacgcagcttcgttaatttctttaaattcactagcaacacttccacttgtatttcttgtactgcttagtgtagaagaagctagctgaatgctttgtttagcaaaatcgagcgcaatttcattttcacgcgttatttcagacattttaaacagcgctttatataaatcttttacctcttctatatgctttttgtgtacatcgatagaaaaagtctccgagccaattttaaatttaatttccacatctaaatcgacagttccagccgtttctagcatcacgtttgaaatgtgatttgtgctgtagttatagcggcgaagcattcgctttttacttgtagcacttgttccatcaaggtgaatgagcgctttattggtaaagcaatattcatctgactttgatttgatcagaaaataaattttttcttgttcttcatgcataacgtaatcgtctgcatctaccttgtcataatcaactggcttaataacagaaccaatatcacttagccccaatacatcagcagctacttttccaaacatttccccatctcccttttaaaaacgattgtgttattttcatgctttaagtgtactgtgcaaatgaggggatgtaaataaaaaaaggagcttctttacaagaagctccacatttattaaaagaacaaatttaaaatcatatagataagtgcagctaatgaagctgaaattggcagtgtgataacccatgtaatcaccatgcgctgtgcagttccccattttacacctttcactcggtgagcagaacctacacctaagatagaagatgaaataacatgagtagtactgacaggtagatgaataaacgttgctccaaagataatggcagcacctgttaagtccgcagctactccattaacaggacgaattttcataattttaccgccgacggttttaatgattttccatccaccaattgacgttccaagccccattgcgaccgcacaagccagctgtacccaccactgaatatcagtaccgctttgcatattgttagcaataagcgctagcgtaatgatacccattgctttttgcgcatcattcgtaccgtgtgtgtaagattgtagggctgcagtcaggatttgaacgcgtcgaaaacgcttattcgttttcgtcaagttatggtttttaaacgttagtttgataatcgtatagacaatataacctactacaaaggctagaactggtgaaattagaagggcttcaatgattttgatgaaacctttgtaatttaaagcaccaaatccagcagctgcaatagctgctcctgcaatcgatccaataattgcatgagaagaactactcgggataccgaaataccatgtgattaagttccatgcaatagcagaaattaatgctgctaaaataacgacagaaccattttgaagcgtataaggatcaacgatatcctttgtaatcgttttggctacgcccgtaaacgtcatagcaccgacaaagttcatggttgcggctaaaagaattgcatgtcgcggttttaaagctttagttgaaacagaagtcgcaatggcattggctgtatcgtgaaagccgttgataaagtcaaaaccaagtgcaccaactacaattagaatggttaatattagcatcgaatccattataatatagccccgttacgcattcttcataataactgattctaagttgttcgcaaccgtttgacaataatccgcaatttcttctagcgtttcataaatttctttatattgaataactttaattggatctttacatgttgcaaataattgttttagtgcacgacgatataatgtatcacaatgtgactcatactctttaattttaattgcatgctcactaatttgaagaagctttttctcagacaacaaattaatcgtaattaaaatttcttcagcacagccttgaatattcttaacaaattcagctacatattcatcaaatgttgtaattgaatgaatttccattaaagcagcaaagctgtcgatgccatcaagtacatcatccatgctcatcgctagctgtaaaatatcttcacgctcaattggagtaataaatgctttgttcaactcagtaatcactgtatgcacgtatttatcaccttttgattcatacgcttttaaaacgttggcaaattcctttaggtcagatacattttgaagttcaaagctgcctaaaaactccgctgagtccttaatattttgggcaatgtccattaacatttcagaaaacttgtctttttttcttttgatcacgttgcaatcctccatccaatttatcgaaactttaccactcgttttttctctctatctttttatatgtgttctagtttcttttttcatttaaagtaatggataaaacttagctgttcattactataacgagagaaaccacctctcttgtgtatcaaaaaattctaaaaaaacaaacgtttaccagagcaaaagtcccaaaaagtggttctttcacctataggttatgcgattcatttttttacgccaagtcaaaaattactcctattattgttaattgtcaataacttttcaaacacatttttttaagcttatttacaatacattaacaataatacgttgattccttttaaaataagggttttcagagtttgtataaaactgggatttacaaaaacttaacattactccccttgtgtaaataataaaagccagctcttttagaactggcttttattatttacttattatattgctgaaatacattttttactttcggcacgacgtaatgacttccgcctttatcttctaccccttcaaccatcattgaaacgagtaagtttttctgttttgtgtccacagctacaaaccatccgttttcctgtcctttttcaccttgagttttctttagctctgccgttccagtttttccagccagggttaacccatctatctttgcagcatgacccgtaccgtttttatcttcaatgacatcaactaaatcattttgaattaattgcgccgtttctttagatattacttgttttttccatatcccactctcatcaccgttcataagaataggctttactatgtttccatcgtttacaatcgatgtatacatcaatgctaagtggagaggattcacttgcagcttcccctggccatagccagagtttgctaatactccctcatctttaatatcttgatcacctgcaattttagacgtttcaaaagggtaattaataggcattttttgattgaacccaaactgttttaaaccactgttaaatttgtctaaacctagcttcaaagcagtctgcgcaaaataaatattatcagatgtaacataagcatcacgtaaattaacattcggcttgcttcccactcgtgttacgtagaaattcccccagcttttatctttttgccatttcttcccgctgattgatatactttcgtttggatttaccacaccttcatcaaccgctaaagctcccgtgactaacttaaatgtagatcccggagaatacgttttggtaaagcgattcattaacggcttatcgggattcgttgaaagggattggtacgtattagcatcgattccaaaagaaaaagaattcggatcaaaagctggcgtgcttacaagacctaatatttctcccgttttaggttgaagagcagtagctactcctttttcatcttttaactgttcataaagggatttttgcacattcgtgtctaccgtaacttgaatgctttccccgtcttttggattcacttttgcaatttcattctttttattaccatctttatctacagtataaatcatgacgccgtctcgagcacgaagcttatcttcatataaagactctaagccaatcattccagctttagactgagcattatagccttcatctttatgctcttttaaatattccgctgtgacaggcgcaacgtatccaactaaatgggcacacgcttcttcacaaggatatacgcgcgcatttacctttttttgttgaatgccttctacttttttcaaagaattctctaaattagaggcgtctttttgactaactgttttaataggaacaaattgattctttttcacccaagaagcgctcagtgcttgattaatacttttttctgaaagagcaagagtcttgcttaattgttgtatagcttgctcgccgcctttagaaaactgctgtggaacaactccaacttgaatcgcttctccgttttgagctaaatatttccctgaacgatccataatttctccacgcacagctgactgagtagctactcttacttgctctccttgcttaagtcctttaaaaatcatattaggcttccaattaatataccaattctctgtatccccttgtttttcttgaaccacagcagcattttctttaaatgagatttcaccggctacagagttcatgtttacttcaaaaggtaaaacagctttatggtcttttatttctaagtcttctattttacttgccttcactttaagcttgtccgcttcaattgcatcatagatatttttatatcgatttacaaaatctttttctgaaatcgtctttttagcatctttagacaagtatccatacatgcctttaaaatcttctttattccacatggctacatatttatcaaatcgttcctgtgctttctgttgatcatttgagcaaccggcagttattaataagagaattgctatagtaaaaaatagccacccaattcgtctcatgatgattttcccccttttttcaataccatttctctatcatataaaattttacataaactttccatcggaaagttacaatcaggaattaattggtattacaacccactaaatttacatatcgacaaaaaaatcaatgggtaaataagaaaaaaattgaacattttgtgaatattttgtgtcttttttggaaagtatttgatataataattgtaagaagaaaaagaataggaggcgactaaaatgagaagattcttacagttttactttatgtttagttctctgttctgttttggaagcgttttcgtcctacttatgtctcaagaatattattttgcaccgttattcctcacactgggctgtttaaatatttttctctttaaagtatatattcaagaaagtcgaaaagataaacaagctgcacctgaaaaaccaaaaccaacaatttaacagactcgtctctcggctgagatgaatgtaaaagaagaaccggtgaaaaattcaccggttcttcttttacgaggttgaagtttttggaaacctatcatttgcaataatctctccgatgcttccactctttccttcaccctcatcaatatttaaaagcgggaacaataactcccctacgtgataagcttcttctaaatgcggatagcctgataaaataaaagattcaattcctaaagcttcatactcttttattcgtttcgctatattttcagcactgcctactagtgcagttcctgcacctccccggacaagccctacacctgcccataagttagggctaatcgtaagttcctctcgggttcctctatgaaggctcgccattcgctgctgcccaactgagtcgtaccttgcaaaagtacgctgtgcagcttgaatcgtgtcgtcgtccaaatgctgaattaatcgatcggctgcttcccaagcttcttcttcggtttcccttacaataatatgcaaacgaatcccaaacttaacggttctgccttctgcttctgcttgctttctcacagccgttattttttctcttacttgttcaggaggctccccccatgttaaatacacgtcagaatgttttgctgccactttttgtcctgcgggtgaagatccgccaaaataaataggtggagaaggtttttgaacaggtggatataacagctcactgttctctacatgaatatgttttccttcataattaactgtatctccaaccaataaccctttccacacatctaaaaattcatccgcagcttcataacgttcatcatgtgataagaaaaggccgtctccggctaattcagctggatctcctcccgctactacgttgactaataaacgaccgtttgaaattcgatcaagagttgacgtcatgcgcgctgccacagaaggagccataatgccgggacgtacagctactaaaaatttcaaacgctctgtttcaggtataagtgaagcagccaatagccacgggtcttcgcatgatttccccgttggaatcagaactccttcaaatcctaaccggtctgctgcttgagcaacttgccgaaaatatgaatagtctgctgaacgacctcctcgatttgtccctaaatatcttccatctccatgggaaggaataaaccataacattttcatgattcaacactccttttcgtttgttctagatgatattccagctcttttaatgaacgtttaattctagcttctgcttcttccgcaataaactcaatttcattttctttcgtataggccacctcagaatcaacaatataaaccccatgaataagagcagtagcgcctaaaacggataaggtcggcttaaatacataatcaagagctaacagatgagcaatggttccccctgtagctatcggtagcacggttttattgtgcaaacctttttcaggtattaaatctaaaaatgtttttaagattcctgtgtagctagctttatagattgggctgacaataataacggcatcagcatctgacactttcttttgagcttcttgaatcgcagggctagaaaagttagcatatagtaagtcttcagccggtagatcgcggacatgtacggttttcacttcatatttttcattttgtagatatgctgcaatatactcacttaaagcagctgaccttgattgttttgaagggcttcctgtaataattgtaaactggctcattatcatctctccttttaacttacaaaactgatagatttacaaggattaatagctatataaatccttattttatttttcacctgcgtagctgtctctccatttaagaagacgcttttctaatactctgacaaatgaatcggttaatttgcctacaacagcaaaaatgataattcccacaaaaactacgtccgtttgagaaaactgcctagcgtccataatcatatatcctacaccttcacttgctcccattaattcagcgactactagtccgagccatgcaatacctaaagacaatcggacaccaagtaaaatattaggaagagcggctggtaaaatgagtttcgtgatttgtttccatttactaaattgcagaacacgcgcaacatcaaataatttcgaatcaacgccgcgaatgcctaaatacgtattaacatagattggaaaaaacgcaccgtttgctattaacaatatctttgaaatttctccaaagccaaaccataagataaataaaggcgccaaggcaaggtgaggaacagttctaagcatttgaatggatggatccatatagtgctccgttttctttgagaaaccgacaattacaccaaatagtaaacctagaccagctccaacggcaaaacctatggcagcacgcaaaatactgatttgaaggttagctccgagttctcccgatacgatgagctgtttaaaagaacgtacaatatcaacaggtgtaggaagaacagttttggatacatagcccgcagaaccaatgatttgccacacgacaataagcaaaattggcacgataagagaacgaaggaaaatcccctgcttatttttcgcttcttcctttctttttttcactttttgcaagtgagctgctgaagactggacatgtcctgaaaccacagatgttttactcattttcatcacctcatttttcttttaatgctttttcaataaatgaattatcaacgacatctcccgtatcaattttctttttaataacgcctaaagattgttgaaaatcagctgttcgctgttgttctgcaataatttctttagaggttgggcgattataggcaggattatttttcaacacttgtcttactacgtctttatctagatttttttgttttgctaaaatatccacagattcttcaaaatgttcattttgccattcaagtgctttttgataaacttgtaaaaacttaacgactaactctggatgatcttttgcaaagccttctcttacaatagtaaaacctggtgaagcaacctttaacgaatcgccgtctgctaaaatacgagcatcattttttaagttttgcagtgagataaacggttcccaaattgaccatgcatcaactgacccattttcaaatgctggctgagcttcgtctggctgaagctgaatgatctttacatcacttggcttcaaaccattttggtcaagagctctgtacaataaattaaaaccgctgcttcctttcgcgaccgcaatctttttaccttttaaatcttttatgcttttaatcttgctattttttcctactaaaatagcatttccttttaatccatcgctcgaattagcaatttctaaaaatggaatgtctgcgccttgaccagaaataaccggtgaatttccaacttgaccgaaatccaagtgtccagatgctaaaccttcaaattgcggaggaccgctttgaaactctgtccatttaacatttacacctatttttttaaattctttttcaaaccatttttggttttgtgccagcattaaagggcctaagctttgttggataccaatattgactgtaacgttttttgaaccttctccgctcgctttttctttcgtcccgcacccagccaatgcgagaacaagtacaatagctgcagttaaaagtagctttttcatctgttctgtctccttctctgtcttattgaacctttaatgttctcctgcttcttcaaattctttcagcacttgctgccttagctgctgaaaaggtagttctgtcttttttcgcggatgactaatttctactggaacgccccggctaattttccctggtctggcactcataatcacaattttagttcccaagtaaatggattcatctaaatcgtgggtaacaaaaatcatggttgttttttcttttttccatatgtctagcagcacatcttgcaaatgagtgcgagtgaaagcatctaacgcgccaaacggttcatctaacaataaaacctctggatttcttaaaagagcacgcgcaatagcaactcgttgagacatccccccagatagttctcgaggataagctttttcaaatcctttcagcctgacaacatcaattagctcatctacgcggcgccgaacattcgaatctttcaaagataagtcagccgctatattttgctccacattaagccatgggaacaagcggtgttcttgaaagatcattccttgtttaatgctaggtccggctatgtgcttccctttgatttcaatgcgcccttcataatctatatcaagtccagcaatcattttaagcagcgtactttttccgcatccgctcggaccaatgatggtaataaattcacctttattaatcgtaagatttacatttcgcaatgcttgagttacttgttctcctttttgaaatgagcggttaaccgattgaatcatgacactcacagcaattcctccttcttgaatttttaaatcaaaagctatttcacctaaaaacataaaagctcctacctaaaaaaggtaggagctttcggttgaccgatcagcccgttgctatagttaactgatttgttattggattattttgaattttatcatattaatccgatttgtcaactgtgttttatatattttatcactttgattcttgaggatttggctttttccatttaaatactgagtttaaaaatccgtatatatgcttagactccttcgttaacaaagggccaataatagctaaaatcaatacataaagcgcggcgaatggctgaagaattgcggataatcctccttcaattccaatgttagccataatgatcgaaaactcgcctcgtgacatgattgttaacccaatgttggtagaggccttgtgtgacagcccgctttttcttcctgaaatcataccggctgtaaagttaccaatgatcgtaagcgcaactgcgccaagcgcaagccatcctgcatcccacagcgtaagaggatcaatacttaacccgaagctgaagaaaaagatagctccaaagaaatcacgaaacggtacgacaagatgttcaatccgatcgcgatgttccgtttcagaaaatacaagtccaagcaataacgcaccaattgcttctgccacgtgaattgtttcagagaagcctgccacaaaaaacaataccgcaaaaacgacgattataaagatttcgtttgatgaaatatttaaaagtttatttagtagcggcgtggcttttcgagcaatgataaagaacagcatcatatagccaaacgcaattaaaatagatgttaaagatccagcaagcgatccgtggtctccaagcaccaaccctgaaacgacagaaagataaacggctaagaaaatatcttcaaacatgatgatccctaatatcagttccgtttctggattcgctgttcgttttaaatcaaccaatacttttgcgacaattgcgctggacgaaatcgtaataattccagcgataatcagcacttcaagaagaggatttcctgtcaggtatccatacaataatcctaaagtgaagttaattaaaatataaatagatcctcccaccgcgatggacctgcctgatttaattagctttccaactgaaaattctaatcctaaataaaagagtaaaaagagaactccaattctccccataaattcaataatctcttggctttcaataaactttaaactgaatgagccaaactcaggagcatggggaccaaccgccatgcccagcagaatgaggaatggaataatcgtaaatttaaatttatgtgctagtatagccgctaaagcgactagtaacaaagctgtcccaacttcaaatactaaatgatccaattatgaactacctccttgtgaaagcaattctttaatgagcgtttttaaattccctcgttctccagagataacaagcgtatctccttcttcaatcaacgtatctggtcctggagttgataattttttttgcgtgtttttaatgacggcgatgatagtgacatcatagttgctgcgaacgtcaatttcaccaattgttttactgtgagctttcgcttgtttttcaactttataccattcaataactaagtcattgaatgccacttcaatggtttccattgcttttggcttgtaaatcatgccgcctaaaattgcagctagctgtcttgattccgtatctgttaacgtaatatcaaaaatgctttcttctaaatctttttgatcgaagtgatagatttcacgtcgtccatcatcatgaatgataacaactacgcggtttcctccgcttgtctcaatttcaaatttacggccgattcctggcaattccgtttctttaatcatcattgaatgatcactcctataaagtttttaaaaagaattttttaattttgccgcgttatttgcctagaaaatccgcatagcaaataagcctaagaatagttggtaattttaggtttgaagaaaaggctgttgaaatttcaaccttttttatttaattgaggtaacttgattgaaagatttttggataaaaaagtgttttcttgaggataaaatacgcaatttgatgcgtcggaatgatgagtttggcactcacccatactaaagcaaaagttactatcacactttgtatgagagatcctatttgtttaacgctgtgcttagctcctggagacatgtgcacgatatccgtgtaatgctgaaccgaactttttgtgaccttcactttttcaaagtcgttatcaataaatttatctggcaaactcgcaaaaggcaaacagaatatcatgcataacaataagctcatccatatatttttcatcatctcacctctctttcttctgaactagtatctcctcacttaaaagtatacgtactctgaaattcaatttcaagcaataagttttttttataaagatttaccttttttataattttttcttaacgttattctttttagatatgtatgcgacactgaaaaaaatatacaaaaagctggctttctaagaagaaagccagctcatgttatagttcaagttctcccattcgaaggagttctacgactgcttgagaacgccccttgactccaagcttttgcatcgcattagaaatatgatttcgaactgttttttcgctaatgaatagttcactcgcgatttcttttgttgttttgtcctgtactaaaagctcgaatacttctcgttcacgctttgtaagtagcggtttaggttgaaactctttttctttcaatgtaaccctccttgcctgatcctgagttgaactatcggatgggtgtaaatttagtcaacatatcttatgtgcggtatgcctacgcggttactagttttagaaaaaatatgcaaaaaactctttttcacttttaaaaaagaaaaaaagcctgaagaaagagccttcaagccattttcatatatttgataaacaccttttcatctcttcattccaagggacgctttttcctgtttttttagaaatttgcaccattgttcctctcccggtgagtacaacctctttttgctcattttgaatcatatagtgtaaatcaaccgacgaacgtccaattctatgagcttttacaaaaacagatagcgcgttgccaaaataaacttgtttgacataatcgcactgcaaatcagccaccaccggtatcgttccctcatgctcactcgtccacttttgcataaagccaatatggtgaaagaattcagtacgtatttgttcaaaatacacaaaagggaccgtattatttaaatgcccaaacatatctgtttccgaaaatcttaccttgatctcctgcttaaacgaaaatgactctttccaatgatccatgtcttcaatatacgaaatattattcatctgtatttcctccgttcgtcatagacaaaataaaacctctccgcgtggagaggttttgagtgattatacttgatcgctaccaaagaaacttctgaatgcttgaattgttgtatcgcggttcaaagctgcaattgaagtagtcaatggaattccttttgggcatgattgaacgcagttttgagaattcccgcagttcgctagtcctccatcacccataatcgtctctaaacgttctcctttatttaacgcaccggttggatgggcattaaacaggcgaacttgagaaagcggtgctggaccgatgaagtttgacttgtcgtttacatttggacaagcttctaagcaaacgccacatgtcatacatttggataactcatacgcccactgacgtttcttttcaggcatacgcggtcctggacctaaatcgtatgtgccatcgattggaacccaggcttttactttttttagtgaatcaaacatacggctgcggtctacttgcaaatcacgaaccacaggaaatgttttcattggctgtaagcgaattggctgttctagtttatcaacaagagctgtacatgactgacgaggtttaccgttgatgaccattgaacaggctccgcatacttcctctaaacagttcatttcccagtttatcggagcaacctctttacctgaagcatcaacagggttacgtctgatttccatcagtgctgaaataacgttcatattcggacgatacggaatttcaaactcctgattgtaaggagcagattcagctgaatcttgacgtgtaataatgaagcgcactgtcttttggactgtttgttgttcactcattgattaacgaaccccctcttgttgtttttttggtttttcatcttttttctttgtgtagtcgcgcttacgcggtttaattaacgatacgtctacctcttcataatggaaagaaggagccgttttcttatccacaaaagctgccattgttgtttttaagaattcttcatcgttacgatctgggaaatctggcttataatgagcaccgcgactttcgttacggttgtaagctcctagcgttacaacacgtgaaagctgaagcatgttttgcagctgacgagtaaatgttgccgcttgattactccatttagctgtatcattaatgttaatacgatcatagcgttcaattaattcttgaatcttttcatctgtttttaacagtttgtcattgtatcgtacgactgtcacgttgtcagtcatccattcccctagctctttatgaagaacgtatgcattttctgtaccttgaagattcatgatattgttccatttctcttcttcttctttcacatgacgatcatatacgcttgaagaaatagcgtctgcgctcttttctaaaccattgatgtattcaaccgctttaggaccggcaaccataccaccataaatagctgataataatgagtttgctcctaaacggttcgctccgtgctgtgaataatcacactcaccagctgcgaataagccaggaatatttgtcatttgatcgtaatccacccataaaccgcccattgaatagtgtacggctgggaaaattttcattggtaccttgcgcggatcatcgcccatgaatttttcatagatttcgatgatacctccaagtttaatgtctagctcttttggatctttatgtgaaaggtccagataaaccatgttctctccgttgattcctaacttctgcgctacgcagacgtcaaaaatttcacgagttgcaatatcacgaggtactaagttaccgtatgcaggatatttttcctctaagaaataccaaggtttaccgtctttatatgtccaaacgcgtccgccttctccacgagcagattcactcataagacgaagcttatcatctcctgggatagcagttggatgaatttgaataaactctccgtttgaatagtatgcaccttgctgatacacgatagatgccgctgaacctgtattaataactgagttcgtcgattttccaaaaacaatcccaggtccacctgtagccataataaccgcgtcagctgagaacgttttaatttccattgattttaaattctgtgcagaaattccgcgacagctgcgctcatcgtcaagaacagcacctaagaattcccatccttcatactttgtcacaagtccggcaacttcatagcgacgaacctgctcatctaatgcgtacaataattgttgacccgttgttgctccagcaaaagccgtacggtgatgctgcgtcccgccaaatcgtctgaagtctaacaaaccctcaggagtacggttaaacataacacccatgcggtcaagtaggtggataataccaggagctgcttcacacattgcttttacaggtggctggttggctaaaaagtctccgccgtacactgtgtcatcaaagtgttcccatggtgaatccccttcaccttttgtgtttacggctccgttgattccaccttgcgcgcaaactgagtgagatctttttaccggaactagtgaaaataaatctacttgcttgccagactcagcaatttttattgttgccatcaagccagctaaaccgccaccgactacgatgatttttccgttactcatcggaaccccactccttcaaaaccttaattttatgcaaatgcgaataatgtacgaacacctacaaatgtaagtgctaagaagattgctaatgtcacataagttgaaattctttgagaacgtggtgttacagttaacccccagctaactccaaatgaccatagaccgtttgcaaagtggaagatcgtagatacaacaccaactatgtagaatgcaagcattgccgggttgcttaaaattcgttccatcatttgaaaatctacttcttttccaagcgcagcttgtattctggtttcccatacgtgccatgtgatgaagataagtgtgattacacctgaaacacgctgaaggataaacatccagttacggaaaaaaccgtagttgttaacgtttgttttagcagtgaatgcgatgtaaagaccgtatattgcgtgaaaaacgattggtaagaaaataatgaaaatttctagagcatagcggaaaggtaagctctccatgaagtgagctgcttgattaaatgattcttctccctttgtcgcaaaatgattcacaactaaatgctgtgttaagaaaatcccgattggtattaccccaagtaatgaatggattctccgatattgaaactctctgtttgccgccatctgcgtagaccccccttagttaaatgaacatagtttgtgaagaactttcttactcccactagacaaatagattaatcgtgaatacaggaaatgaaaacctttgcatttcctaataaagtatgtgacaggttaattttactcccatcgattaagagcgtcaaggcaagatgtttaaatcttctataaaatataaatttataaaattttatatttgttaacgcttactgtattgatgttacaggttttttctttctattataatattgcttgccacaaataagtaagcgtttactttacacttttattgtaaacaagttcacaaaacatttacacaggtaaaagtacccttttaaaaggtatattatggattttttatctttacatctaactctttttaccataataaagatcctcttacattttattaaaaaaatgcgtgagaggttttttagatttgtatataatagtagtaaagaaagaggggaaaccatgagcaatttacaaacagaatcacagcaagaacttgaagagacgatggaaacatcagaacctaatgtcacagctgaaacagagggaactcttgatcacgtttcatatttcggatacagccttttgcgtgatgtgttaattccagagcttcttggagacgagacgaatgccatttcatactgggcaggaaaacaccttgcgcggaaatacccgttaaatacaatggatgaaatcgtcgctttttttaaagcagcttcctggggaacactgacacttgcaaaaaaagataaatattcactagaacttgagttatcaggtgatgtggtcagcaaaagatttcagcaggaaacttgttcgtttcatcttgagtcaggatttgtggctgaacagattcagcgtcaaaacaactgcctaacagaagcctacttaacacataaagaaaagaacggaaaagtgctgatttccgtgcagtgggaccgaaaagatatcttacctaccgaaacacgcgcggagcgttataaaaagtaggaaatacgtatataaaagacgtggagataccacgtcttttttctcttctttatacttgcactgcttgctgctcttctaattcaaatgctatgtgaagcgtctcaacagcttttaccatatcagcatgcggtacaactgtagatactttaatttcagacgtgctgaccatcttcacttcaattttctctcctgccagcacttcaaacatttccgctgcaacgcctggattagaaatcatgccagagccaacaattgatactttagccagaccgctttcatgttcaatacgcgtatatcctaaagtagatttatactcttttaagacggcaagagcggcgtctacgtctacggttttaatagaaaatgagatagagagacgattattagcggttacgttttgaataataatgtccacatttaactgttcttttgctaatgctgtaaaaatagtagaaagagtttgcaactcgttgtttaacccttcaattgttactcgtgaaatattatcttcaaacgcaattcctcttacgaccaagttttgttccattgaaacttcctcctcaacaatcgttccattctcgttttctaagcttgaacgcacttctagcggtacctgataattttttgcaaactcaacagcgcgcggatgcagcacccctgctcctaaattagctaattctaacatttcgtcatatgaaatagagtgaagcttacgagcatcttctacatagcgcggatctgtcgtaaacactcctgttacgtctgtataaatatcacattttgcagcttttaatgctgcggcaagagctactgccgtcgtgtcagagccgcctcgacctaatgttgtaatgcttccatcttctgaacagccttggaatccagctactactacgattcggcctctatctaattggctttgaatacgagtcgtgtcaatgtgctggattcgtgcattgctgtgaactgcttccgtctggataccagcttgccaacctgttagcgaagttgcttcataccctttatattgaagggccattgttaacagggaaatcgttacttgttctccagttgtaagaagcatatccatttcgcgtttgcttggactgtccgtaatatcacttgctaatttcaccagtgcatctgtagttttgcccattgccgatacaacaactactacttggttaccgcgctctgcttcttgaataacacggtttgctacattttggatacgttcaacagaaccaacagatgttccaccaaatttttgaacgattaatgccataattttgttcattccttttcaataaatttgcatatgcaggatgatgagaagctaaatttttttactcagacaataaaaaaagcaatgagatgagctctcattgcttaacgaacgaaaattataaaacataaccgtccactgccgtgagatagctctccaagaatctacatcttgacaatcctacgtttattcaacgcagaaccagcaatcattactatgaggtaatgttcacttcggcaaatttccctttccgcatcattcataagagctcatacccttcctgatacgtactgattaaatttgcacctctatcttcacttcatttgatgaagtgtcgtatgaaattagttaatagcttatcaaatattttctattatttcaagactatttttgcaatgtttcataaattttttcagcgatgttttgaggaacacctgaatttcgaatatcatcaaccgttgcttctttcaattttttcacggaaccaaaatactttaacaaagcttttttacgcttttcgcccactcccggaatatcgtccagaacagactgaaaagcagacttagagcgcacttgacggtggaaggtaatcgcaaagcggtgaacttcatcttgaattcgctgaagcaaataaaattcttgactattgcgttcaagcggtatgatttgaggaggctcaccaatcatcaggttggaggttctgtgcttatcatctttgacaagacctgctgtaggcactaaaagtcccaattcattttcgagaacgtcctgtactgcagctaaatgccctttgcctccatctacaacaattaaatctggaagcggaagaccctcttttaacgctctggaataccgtctgcgaacgacttctctcatggaactgtaatcatctggtccctttaccgtcttaattttatatttgcgatattctttcttttccggtttcccatcaacaaaaacaatcatcgcagaaacgggatctgtcccttgaatatttgaattatcaaatgcttcgatccgataaggagcggcaattccaagctcttctcctaaccgttcaactgcgccaaccgtgcgctcttcatctcgttcaattaaatagaatttttcaccgagcgcaatttttgcatttttacacgcaagttctactaattctttctttttgcctcgctttggatgctgaacctctacttccactaatttctcagccaactctgcatcaatcgttgctggaaccatcacttcttttggcttaatatttttggcataaaactgaccgataaaagttaagaaatcttcttctggctctttataaaaaggaaacatagaaacttctcgctcaattaacttcccttggcgaataaagaaaacttgaacacacatccagcctttatcataagaatagccaaacacatctcgattaacaaaatcattaaacgttactttttgcttttccattgtcgcttcgatatgagcaatttgatctcgatattctttagcccgttcaaagtcaagttcttctgaagcttttaacattttttcagttaactctgttttgacatgctcatatccaccatttaaaaaccgcgtgatattttcaataatttgtttgttttgctcttcttttacttcttttacgcaaggagctaggcattgcccgatatggtaatacaaacaaggcctgtctggcatggtagagcactttcttaatggataaatgcgatcaagaagccgctttgtttcatttgcagcttgaacgttaggataaggaccgaagtatttccctttatctttttttatttttcttgtaataacaagtcggggctgtttttcagctgtaatcttaataaagggataacccttatcatctttaagcatgatattgtattttggatcatgctttttaattaaattcatttctaaaataagcgcttctaaattagaagatgtgacgatatattcaaaatcgacaatgtcgtttacaagtcgaagcgtctttccgtcatgagatccggtaaagtaggagcgcactcgattttttaatacttttgcttttcctacgtaaatgaccgttccatatttatctttcattaagtaacagccgggctgatccggtaaaatagccagcttttcttttaaataatcgttcatatttttctccttcctcttctcttactctgtccatctatacattcgcttatgaagcgtaacctacattctttcctgccttacaatacatgcacataagccggatttatggcggtgttccttacatctagtataaaacaaacgaacgcatattcgctaaataaaagtattcccaaaagagaaaaagtggagaaaaagaaaaaacctagcctgagctaggttttgacttacgcgtgtttattaattaattctgttaatgcttcttttggttggaaaccaactacttggtcaactttctctccatctttaaataatactaaagttgggatactcataacaccaaattttccagccgtttcttggttttcatcaacgtctactttcacgattttaactttatcgttaagttcgccatcgatttcttcaagaactggagcaatcattttacaagggccacaccatggtgcccaaaagtcaacaagcactaagcctgatttaatttcatctgtaaagtttttatctgtagcatgtgcaatagccattttaattcctcctaaatatatgcaatatccaaattctactcacagtatatcaccttcaaataaggtttgctaactttttgcttacatttatactgtttattctccgctctagtttgtacaattcacataaaaacatacgtagaaaatttcgttttccatgaggctgagacataacgaaatgaatcctatctaaagacgaacgaatagtatacaagggctgaaccacttgcgacaccgcagatgatttctgtgtaagacttcgctttctgcaggagtcttcgccttgccctccaatcaactgctagaaagacccacacacatgaaacctgcgtttaccctaacaaaaaaacgaaccactaatcaaacatcttgatcaatggctcgttcttcacttcgtctaaaaatccttttgtcccagcctcttacgcagactgtactttcagctttttaaattcttccgttagcagaggcaccacttcaaataaatctccaacgattccgtaatcagctactttaaaaatatttgcctcaggatctttgttaatggcaacaataatttttgaatttgacatgccggccaaatgctgaatggctcccgagattccgcaggcaatgtataaatctggtgtgactactttgcccgtctgaccgatctgaagagaatagtcgcagtaatctgcatcgcacgctccgcgagacgccccaacagctccatttaacacgtccgctagttcttggagaggtccaaaaccttccgtgctttttacacctcgaccacctgcaatcacgacttttgcttcggataaatcaaccccttgcgttgctttccgtacaacttcttttacaactgtacgcaggtttttgatttcaacatttaaatcctctacatggcctgtacgtccctcatcttttgcaagcggtgaaatattatttggacgaatcgtgacaaacgtaaaagcatcggtcatgattttcttttcaaatgctttaccagaataaattgggcgggtgaagactacttgatcccctccaacttctacatccgtcacatctgagataagtcctttgtctaagcgagctgccagttttggcgctagatctttgccaagagccgtatggccaaatacgatagcttcaggctgttcactttcaatgatggctaataacgcctgagcataaccatccgatgtgtaagcagctaaatcttcatgctccgtcacaacaactttattcgctccgtacgcaataagctcttcacttaaagcttttacgtcctttcctactaaagctgcaacaatttccccaccgtcagctacagtagacgctgcggaaatcgcttcaaacgatacgtttcgtaatcccccatcacgtgcttctcctagaactaacactttgcgtcccattgcaatacccccattgttttgacttttgacttattaaatgacttttgcttctttatgcagtaaattgaccagttctgtcacttgatcttttatatctccttgtagtacgcgtcctgcgtcttttttcggaggcaaataaatttcaattgtctttgtttttgcttctacatcatcttcatctaaatctaaatcatccaattccacttcaaccaacggtttcttcttcgctttcataatccctggaagagatggatagcgaggttcgttaagtccctgctgagctgttactaaaagaggaagcgacgtttcgataacctcggagtcaccttccacatcgcgtacaacagtcactttttcaccttcgatatccaattttgtaatcgtcgtaatataagggatttctaactgttctgctacgcgcggccccacttggcccgaacctccgtcaatcgctacgtttcctgccaaaattaagtcaggagattgttcttttaagtactgtgccagcagcctagaagtcgtgtactgatcgccatcttctatgtcatcttccgtattgattaaaaccgctttatctgctcccatagccaaagctgttcggagttctttttctgattcttcccctcctacactcacgaccgtaatctccccaccatgcttttcctttagctgaatagcttcttcaactgcatactcatcgtaaggattaataataaattcagccccatcttcaacaatttgaccattttttaatgaaagtttctcctctgtatcgaatgttctttttactaacacgtaaatattcattcaattcccctcctaagcttattttcctaaaaatttaggctggcgcttttcaataaaagcagctacgccttcttgagcatcccggcttttgaatacgcttccaaaaaactgcgcttcttttttgataccgctgtaataagcatctgtttttacatgctgaagcagctgcaaggtagctttaacagagattgggctttttttggcaatttttctagcaagtaaaaaagtttcattgataagctgactttcttcaaaagctgcatttgccaatcctaactccactgcctcgcttccggatattggatcacttgtcagcatcatctcacaagccttatgaactcctacataacgaggtaatcgctgagttcctccaaatcctggtataatccctaactgaagctcaggcaagcccagcttagcattttctgttaccaaacggatatggcagctcatagcaagctccaaccctccgcctaaagcagctccatgaatagctgcaatcactggttttgggtaattttcaatatactcaaagagctcttgaccgttaacagcaagcttctcgtattctttttcctgctgaagtgatgtgaattcttttatatcagccccggcacaaaagaatttcccttcacctttaatgacgataacccttgtctctttgctatcttctaaatgttttaaaacacttgaaagatcttttaataaatcttgagacaaagcgttagcaggttgtctattcaacgtaatgaagcttattgcatcaacagtttcaacctggataatctccatttgtttacgccaccctttctttctattttcattaccttgcgcttttcccctcgcgggggagcagcaggctcacttacgattatgagccgctgcagccgtttaacagcagggaatggactttatctaccgattctattagaccatatcgatgatcgttcattacccatgttgtgacagtttcatcaatcgttccaaaaatcatctgtcgcgcaagacgaatatctatattttcagaaaactcatccgtttcgattcctgtctgcaaaatagaatcaatgagagtcagataatcttttaatacatcgttaatttttaatcttaaatctttgttcgattgacgcagttcgagctgtgtcactgtagctaaatgatgatcctccgctagaaacgaaaaatgtttgtcaattaacacatgaagtttttctgccgcggtttcaattcccgccagttcttcataaattttttctacaaattgtcccatcttctcttgaaataaggaaatcaagacatcttctttgtttttaaaatataaatatatcgtaccgtctgcaactccagcctgcttagcaattttagaaacctgagcattgtggtatccgttttctgctattactactacagctgcatcgataatctgtttatactttggcttatttcttctcaatcttatacgctcctttaaaatatgaatgattattcattcatatctttataataaagaaaccgcaagtatctgtcaattatgtttcagtaaaaaaatcaaaggcgacgatcgattacgtcgcctttttatgcttttcattttcttcatcaatcagcgctcgtcgcagaatcttaccgaccgctgttttgggaagctcatttcgaaattcataaaggcgcggaactttataagcagctaaatactttctagaaaactcatttaactcttcttcagtacatcttacaccattttttaatacaatgtaagccttcaccgtttctcctctatatgggtcaggaacacccaccactacagcttcttgaattttttcatgctcatataatacttcttcaacttctcgaggatagatattatatcccccggcaataataatatctttcttccgatctactacataaaaataacctttatcatccatatagccaacatcacctgttagcaaccatccgtctcgcataacagcctccgtttcttcaggctgcttccaatatcctttcattacctgaggacctttaaccgcaatttctcctacttcgcttacagcagcttctttacctgtttcaaacgagagaattttggcatctgtgtctggccaaggcaccccaatgcttcctggtattctctctttccaaagaaaattagcatgagtaacaggagaggtttccgttaatccatatccttccactaatttacctccggtgagcttttcaaactgctcctgcacttccacaggaagtggagccgaaccgctcatacatgaatcaatagaagataagttgtattttgctaaatcaggatggtttaataatgcaatgtaaatcgtcggagcacctggaaataaagtaggctgctgcttatggatggttttgagcgtcgtttttgcatcaaatttaggcagaagaaccatctcatagttttgcaaaactgataaaacaagaaccgttgttaaaccatacacatgaaaaaatggaataattccaagtactttttcttctccatacctacagcggtataaccaatgtgaacacattgttgcattggctaccaagtttttatgagtaagcatgactccttttggaaaacctgttgttcccccggtgtattgtaaaatggcgatatcttcgtctgaaattccctcagcgttacatactgcgggagaggattcatttataatacgtttaaataaatgagtagtctccgtatgactcacatccacacttatcttctgctgcttgcgctgaataaatggatagattatgtttttgggaaatgggagataatcttgaatggaggtgataactacgtgctttatctttgttaacgctttcattttaactacacgcggatatagcaaatcgagtgcaataatcatggtcgcttctgaatcattaagctgatactctaactctctttccgtatacaaagggtttgtttgaacgactactcctccggcaagaagaacagcataaaaggaaatgacagcttgagggcaatttggaagcataatggctactctatcccctctttttaatcccagttcaataaggtaagatgacagcttcagagaatcttgatgcagctgggaaaacgtcatttttttccctagaaaatagattgcgctttttttaggatccttttgaactgcttcttcaaaaagctgtgctaaatttttttgttcataatgaagcctatcaggtatttcatccggatattgagaaagccatatcttttcggtggattccacacgcatcctctccctcaaaaaaataaaaaattagaattttctaattaaaattatagttcattctttttttagatgcaatcgttattgaatgttctctttcctacctaatcactctttcattctgcagcgtaataaataaaaattggatttacccctgtacattatccgaattttttgtatataataaaaattagatttttttaaggagctgtatgaattgacaacaacattgactaaaggaccgttcaaagcagatcacgttggaagctttttgcgtcccgagcgtatcaaacaagcacgattacaagtggaaaacggggaaatgacaaagaaacagcttcgagcaattgaagatgaagaaattcgtaaactcgtagaaaagcaaaaacaaattggattaaaagccgtcacagacggggagtttcgccgcgcgtggtggcactttgattttctgtcagagcttgttggcgtagaactttacgaagcagagacgggaattcagtttcacggagtccaaacaaaagctcacggtataaaagtgactggaaaactagattttaatcaccatcctatgattgaagattataaatttcttcatcaagctgctggaaaagaacacgtagctaagttcaccattccaagtcctaatatgctgtttttcagaggtcatattgaagagtctgcttactcggatacggatgtattttttgctgatttagttaaaacatatcaaaaagccattcaagcattttatgatgccggatgccgctatttacagttagatgatactgcgtgggcagtctttttctcagaaaaaggacaagaacaaatcgcgtcaaaaggtttcacgccccaagaattactgaaacgttttacagatgcgatcaatgaatccattgcgcataagccagatgatatggtcattacaatgcatatttgcagagggaatttccagtccacttatacagcaagcgggggatatgaaaatgcgtccaaagctattttcagtcagttaaacgtagatggattatttttagaatttgatgatgaacgctcaggaggattcgaacctcttcgacatgtaaagcgagatgatcttcagattgtccttggtcttatcacatcaaaatttggagatttagaagatcctgaagcattgaaaaaacgaattgctgaagcagcagaatttgtttctcttgatcaaatctgtttaagtccccagtgcggatttgcttctacagaagaaggaaatttactaactgaagaacagcagtgggataaagtaaagcacgtgatttcaatttctgaagacgtatggaagtaatcattaaaaaagctgacctgctttaaggtcagcttttttgctgtcatcatgatattaggaaaagctatatagataaatagataagaccaataagcataaacactccgcataaaacgagtaaaattttcgctaacttctccatgactctctcctatcctatccctgctcctattacataggacataccgattgaaataacaagtgaaataaacccaacggccctgttatcttgttcaatttcgtcatcgattcgaaattttggcgtcaaaaattcgaaaataaaatagctgactagtaaaagaacgaatccatatattccccatcctagcattcttaacaagttgtcgttatgctcaatcgaatagcgaaaaatattagctaatccaaatattttcccacctgttgccatcgcaacagccatatttcctttttgaatctcttcccaattcttatacttagtaacgagctcaaacacaacaagaaagacgacaatgctcaagacaaccacgctgtaataagcggcggattcaatatacgggtctttccaaaaatccctcatttttgcatcactcctaatttatattacgctccacgcaatgaactggcaggtctctttcctttacttgtatcgttcttaaaagagatagaaaacccagcatagtccatgagccatgtcggattttctatcttcacatatgcttgttcagcgcatcgactgacacctttatttcagcgttcttttatttaaattccacaaccgtaacgccagaacctccttcagaagcttctccgaaacgaatatttttgacagaacgatgatttttcaaatattcctgtacacctttacgaagagctccagttcctttaccgtggataatcgaaacgcgcggatagttggctaataaagcatcatcaatatatttttcaactcgaatcagcgcattttcatagcgctctcctcttaaatccagttctagatttacatgataatcttttccttttaccgtagcaagcggcttcgtttctacaggttttggagaactgatatattcgaggtctttttctttcaccttcattttcataattcccatttgtacttgccattcattattgcttactcgttccacaagcgttcctttttgtccccagcttaagactttcacttcatctccagcttgaagagtgcgctcttgttttttcggcacagccggtttctttttacttttttcaagagttggaactgcatcttctagacgcttacgcgcctcaatcaattcatgctcttttacaagcgcatgatttttttgactcattttacgcaaatcgctaatgattttctctgcttcttcagatgctgctttaactgtggcttgagctttttcttcagctttttcgtacagcttatctcgtttttcattaaactcaataatctgactctgtaattctttatgaagcttctgagcctcttttcttagttcttcagcttcttctagctcgtgttcagattgacggcggctatcttcaagagaggcaatcatattttctactttatttgtttctgagccaatatagcctttggcacgttcaattacttcagcacttaaacctaaacgttttgaaatctcaaaagcattgcttcggcccggtacaccaatcagcagcttgtaagtagggctcaatgtttcaatatcgaactctacgctagcattgaccactccttcacgattatagccgtacgcttttaattcaggatagtgagtagtcgcaactacgcgagcgcctctttcatatacttgatctaaaatcgaaatcgcaagcgctgcaccttcttgaggatccgttcctgctcccaattcatcgaacaagaccagactttcgtgatctactttttgtaaaatatctacaatgttgaccatatgagatgaaaaggtactcaaactttgttcaatcgactgctcatctccaatatcagcaaatacgtgtttaaacacagccatttccgatccatccagcgcaggaatctgcaaacctgcttgagccattaacgtaaataatccaagtgtttttaacgttacggttttaccgccggtatttggccctgtaataacgatggacgtatattgatcacctagctcaatatcattcgcaacgacatcttcctgtgcaataagaggatgttttgccttcactaacttaatatagcctcgatcgttcattttaggttttgaagcttttagctcatggctatagcgccctttagcaaacatgaagtccagctcacctaacagataaacgttttgacggagttcatttgccacttccgctacctgaacggttaaagcaatgagaatacgctcaatttcttgtttttcttttacttttgcttcttgaagctcattgtttaacgtcacaatcgcctgaggctcaataaataaagttgctccggatgaagattgatcgtgcacaatgcctccatacgcactgcgatattcttgcttaacaggaataacaaaacgttcgtttcgaatggtaacaattgcatctgacaacattttttgagcagacgaggagcgaataaggctctctagcttttctcgaatacgagactccgttgagcgaagtttttgacgaatgcctcttagctggtcgcttgcaccgtctagcactgtgccattctcatcaatactcattttaattgtttgttctacctcaggaagaggcattagtttttcgatatgttcagttataattgaaagctgtaaatcttcgtcttccactacttgctcgataaattgcttgacttgtcttgcagcataaatagtgcttgctacatcaagaagttcattagagcttagcgttcccccaatttcagcgcgcttcacgctaggtcgaacgtcaaaaatgccccctagcggtacgttgccacgcaatcgcagcacggttgtagcttcatctgttgcttcctgccatttaactacttcttcatactgagtcgagggaatcaaattcgctactttttctcggcctaaagaagaagctacttttttctgaagctgttccttaactttattaaactctagtacatgaaaaatacgtgattgcaaaactgattcctcctgttgcttatttatgtcgatttaaaaaggcggttaattttttgaggctatacgtatttaataccgtttctggtttaagccagcctttaattcccgtagatattccaatttccatatgctctagcatgtctagattgtgagcatctgtattaatagcaattttaactcctgcctcttgggctttttttatgtgctcagcagctagatctaaacggtttggattcgcgtttagttcaagagccgtttttgtttctttagctaattcaatcagcatatcaatatctacatcatatccgttgcggcgaccaatcaaacgaccggtcggatgagcgattaaatctacatgaacattgtttaacgcttgctttaagcgattcataatttcttcgcgtgattgcgaaaaactagagtgaatggacgcaataacaaaatctagctcagctagcagttcatcatcataatcaagtgttgcatcaggcaaaatatccatttcaattcctgctagtattgtaaaatcatcgaactgtgcgtttaaacgattaatttcttcacgctgtttacgaatgcgttcaggcgttagaccgttagctacttttaaatactgagaatggtctgtaatcgccatgtactcatagcctcgcgcgcgacatgcttccgccatttcttcaatcgaatacgccccgtcactccacgtggagtgcatatgcaaatcaccttttacggcaccgtaggtcacaagcgtttgaggctttacaaacgcatctacttccgttccatcttcacgaagttccggcggaataaaagacagcccaaaatgttcatagaatgcttgttcagactcaaaagtcataacttcgcctgtatccgcattttcaacgccatactcgctaattttttcaccgcgttcttttgctaattgacgcatacgcacattatgatcttttgatcctgtaaaatggtgaagcgttgtggcaaacgctttatcttctacaagacgaaaatccacagacacatcgtactcataggctaacgttaccgatacttttgtatctccatttgcaatgatatccttcacatttggcagcgatactagctgttcacggacagcatgaggctcagctgttgaaataataaaatcaagatcttttacggtttccctcatgcggcgaatgctccctgcttgagaaaaacgctcaatgctatgcatctgtttaagggcttctaaaatttcttccgctattggaagcataaaagcaagaggcaaacgatcaggacgcttcccaaactcttcaatagcagcgataattttttcttcggtctttttaccaaaaccgcttagtccctgcactcgattttccatacaggcctgatgcagtgattccatatctcgaatatctagctctttatataatttagcaatttttttacctccaagccccggcagcttaagcaaaggaataagtccttcaggaacttcttgctttagttcttctaatacgcttgactcatttgtttccatatactctgtaatgactgcagccgttccttttccaatcccttggagcttggtaaaatcctcaatctctgtcagcgttctttcgtccgtttctagcgctgcagctgcttttcgaaaagcggaaattttaaaagggttatctccttttaattccatatatgtagcaattgtttctaacaatttaataatatcctttttattcatctcttttcaccagcctattatcataataacgaacttccaaaaacatgatgagtgacatatttactctctcaaattttcatctagacatacttttatcctcgtgaaaaccgcagattagactgcgataaaaaaagagggtatctcaaaagtattatgacactttcgacacaccctctcaacaagctattgtaatttcattacattacaccatactgagtccacaaatcttgaatcgcagacgataagtatggagtattttgtacgatattgattgcaattgaagactgttgaattggcgtttgaatttcacttacaggaatcacggctccaatgtataacaaaataaaaacgatgatatacacttcaacgaatccaagtgcacctccgccccatttatttaactggcgcagaattggcagttcggttaaagccgttaaaacagagcctgcaaggcgaagtacaatgtgagtagcaaaaaataaaatcgcaaatgcaatcattcgataaaaagcgtcttctatcgttccagaatcaaatacaaacgatgcgacactttgctgctgaatattgtccggaaacggaatcaacaagcgaagtcggcttgccaaatctccactaaacatataagcgacgataaacgaaaccgcaaaactgacaatatgaatgagctgcaaaataaatcctcttttaagacctgttacaaagcctaaaagaagcaatataattaaaatgatattaagcattgactcagtcattcctcttttccataaagtttttgttcaagtctctcatagtcttctttcagttttatatattcgtgtacagcattcacagctgttaatactgctaatttattgatatctaaagaagggtttttagtactgatttcacgcattttttcatccactatagaggcgacaagtcgaatatggcttgtactttcgctaccgacgatgctgtactgctgaccaaagatgtcaactgtcgcacgtgttttatcttgtcttgacacgagaaaatcctccgttccacgaaaaatcctaatccctatcataccacgaagaagacttcaatggaaacatatctatatttaagctatcataagggatagtgcttataaagtaaactaaaataccccgaaaggagtgaagcattatgtcacatgctgttattaaggtatcagctgatcaaatagctaaaatgaagcttcattacacatcctatctgcagcctaaactgccgcagggaagtattttttcggctaaaactcccggctgttctatcactgcgtaccgctctggaaaaatactttttcaaggaaaagaagctgaaacagaagcggctaagtggggaggctctttagatgctgcgaaaaaggctcctgtctcacacctcccatcaaacttcagctcactatcggtcatcggttctgacgaggtagggacgggagattattttggtcctatgaccgtagttgctgcctatgttcaaaaagagcagcttcctttgttaaaagaattaggagtacgagattcaaaagagttaacggatgctaaaattattgaaattgccaaacagcttgtttcgtttattccctatagtttgcttgttttacataacgaaaagtataatgcatttcaagaaaaaggaatgtcacaaggtaaaatgaaagctctattgcacaacaaagctttatccaacgtgttaaaaaaattggatcctgaaaaacctgatgccattttaattgaccagtttgtcgaaaaaaacacctattataaacacgtggtaaaggaaaaagagattatcaaagaaaatgtctttttcagtacaaaaggagaaagcgttcatttatctgtagctgctgcttccattattgccagatacgcatttttaaaacaaatggatttgctgacggaaaagaccgggatggttattcctcgcggagctggcgcacaagttgatatcgctgctgctaaaattattaagaaacatggcgtcaatgcgctgaactctttagctaaaattcattttgctaatacagaaaaagctttaaaattagctaaaaaataagagatgtggaaatccacatctcttttcttattcttatgaacgaagcgttgcaccaaattctttttctacagcttctaacactgcaccatgtgcttttgctacttcttcatctgttaatgtacgttcaggatctaagtaacgtaaagagaaagctacagatttcttgccttcttccatacgctcgccttcatatagatcaaataccgtcacgtcttttaaaagttctccgcccgtcgtatagatgacgcgctgaacttctcctgcaagaacatttttatctaccacaagtgcaatatcacgtgtaatagatgggaatcttggaatagctgaataacgaacttcttcgacatctgcagctaatagctcttgaaggtgtaattcaaatacgtatgtttcacgaagaccatactgtttctgagcaacaggatgaacttgacctacgtatccaatttctttttcatctaaccatacagccgctgtacgtccagggtgcataccgtcttttttaacgggagcatatgagattcgtttctccaaaccaagctgtgcaaataacccttctagtacacctttaatcacatagaaatcaacgactttcttttcaccttgccagccgtgagcatgccatagacccgtgattgcaccagctacgcgctcctgctcatccggtaattctccttcacctttagataagaacactgagcctgtttcgtatagcgcaatagaatccgactgacgagcattattatgcttcactgcttctagcaaatgaggcactaagctttgacgaaggatactgcgatcttcactcatcggcattgctaaaccaatcgtacttgttgcatttagtgcaaactgagtagctttttcagcgctcgttagcgaatatgttgtcgtttgtgctaatcccgcaccttctaagaaacggcgaactttacggcgtccaagctgatactctgttagttttcctggagttgccactgtcacaggaagcgttgtaggaaggttgtcatagccatacatacgcgctacttcctcgacgatatcttcttcaattgtaatatcgcctctacgagttggcactgttacaacaatggtttcgtcttccactttgttttcaaattgaagacggttcataatgtcttgtacttcttccattgatagctccgtaccaagcacatcgttaatacgtccaagtgacacagctacaacagcaggttccacagttagtgtatctacttctacagtaccgcttaccacttcacctgaagcgtattcagccattaattctgctgcgcggtcagcagctacacgcgtacggttaggatcaattcctttttcaaaacgagcgcttgcctcactacgaagaccgtggtcttttgaagcttggcgaaccgttaagcctttgaagtaagctgattcaatgagaacatttaccgtatcgtcttttacttcggagttcgctccgcccattacacctgcaagagctaccggctcactgccgtttgtaatgacaagctgattgtcttttaatacgcgctcttgatcatcaagtgttacaaacttttcgccttctgacgcgtgacgtacaacaatttcttttgaaccaagacgatcatagtcaaaagcatgcagcggctggccgtattcaagcaaaatatagttggtaatatcaacaacgttgttatgaggtcgaataccagctgccattaaacgcatttgcatccataatggtgacggagcaatttttacgtttttcacaacgcgcgctacgtaaagcggattgtcttcttttgcctctactttaacggaaatataatcagctgcttgctcatcagacgtttgcacgtttactgacggatacttcacttcacgacgtaaaatagcagccacttcatgtgctacacctaacatacttaagcagtctgaccggtttggtgttagccctagttctaatacttcatcgtttaagtttaatgcatctagtgcatccgctcctacttcagcatcgcttgggaacacgaagataccttcttgataatcttttgccacaagcttgctttcaatgccaagctcttgaagagaacaaatcataccgttcgattcttcaccacgaagcttagcacgcttgattttaaagttacctggaagtacagctcccacttttgcaaccgctactttttgaccttgtgccacgttcggtgctccgcacacgatttgaacgatttctcctccgccaagatctacttgacagcggcttaatttatcagcattcggatgctgttcacgttctacaacgtgaccaattaccactccgctgatgcctttatttaagttttctacaccttcaacttcaattccactttttgtgattttatctgctaactcttctgcccttacgcctgataagtcaacatactcttgtaaccaacgataagatacaaacatcgtagtccctcctttatacttgtttaaattgatctaagaaacgaacatcatttgtatagaaatgacgaatatcatccacgccgtgttttaacatagcaatacgctctacaccgattccaaaagcaaaaccacgatatttagttgaatcgtatccagccatttcaagaacatttggatgaaccatgccagctcctaaaatttcaatccagcctgtttgtttacacacattacagcctttacctccacattttgcacacgatacgtctacttctacagacggctcagtgaatgggaagaaacttggacgaagacgaatttcacggtctgcaccgaacatctttttcacaaatacttcaagcgtgccttttaaatcgctcatacgaatgttttcgtctactacaagaccttcaatttgcatgaattgatgagaatgcgtagcatcatcgtcatcgcggcgatacactttacctgggcagataattttaacaggtcctttgccttcattcttgttcataacacgagcttgaacagttgatgtatgcgtacgaagaagcgtttcttccgtaatatagaacgtatcttgcatatcacgtgctgggtgaccttttggcaagttcagcgcttcgaaattatagtagtcctgctctacttccggtccttctgctacttcatagcccattcctaagaataaatcttctacttcttcaaccacgcttgttagcgggtgatgcgtacctgctttaacagggcgtcctggcagcgttacgtcgattgtttctgaagcaagtttacgctctacctcagctgtttctaacgccgtttgtttttcttcaattttagatgcaatagcttcacgcacttcatttgcaagtgctcccattacaggacgctcttcagctgaaagttttcccataccgcgaagtacttctgtgatagggcctttctttcctaaataagctacgcgtacgtcgtttaattcttttaaagcacttgctgcttcgacttttgcaattgcttcttgttgaagttcttgtaaacgttctttcatcacttattcctccttttaacgtaaaaaatgacaaataaaaaaacctcctcccaaaaaagggacgaggattagtcgcgttaccacccttgttaactatatacacagacgtatacagttcacttcattcaagttaacggaatctccggaacacctttacatctatgtaagatggtctaagtgtcaactcaagaggtgaattcacttattacatttataaaaatgctttcagtcgcggcattttctccctgcataaacggacataagctactgctctctttcatcgttttttacatatgtaactattgtattattatagtgaaaacacgttctcgatgcaactacattccgcgtaaataataaagtaagattccagaagcgatggcaacatttagcgactcgctctttccatagatgggaatgtacagattctgatccgtttgttccagcactttctcgcttacgccgtttccttcatttcccacaatcagcgcaaattcgtttgaaggttttacgcatgtatagacctttccattttgtagagacgtgccgtaaactgctattcctctttcttttaacagtgaaatcatttcgagtaaatcgccttttacaattggaagatgaaaaatagctccttgcgttgaacgaacgacttttgggttgtacacatccacgctgccctctccaacgataatagcgtccactccggcagcatcagcagttcgaataatcgtacctaggttacctggatcttgcaccccatctaaaagcaatactttctgtgctgtatgaatgatttctgcatgcttcgtttgaaaacacacagcgataattccttgaggtgtttcggtgtcagataataatttgattattgcttcgttgacaacggttatttcgataccgtctatgttccactgtgctggcacttcgatcgattcgcgtataattagttcctttacgcaatccttatttttgatagcttcttcgactaaatgaaagccttctaccataaaaaggccctgcttatcacggtcttttttattatgcagctttttccacgcttttacctgcggatttttaactgaatcaatttgtttcacaaacataactcctttatctatataaaaataaatagttcgattacattttgctcaataatcattagataagtttcactttattgtacatagaaatcgcaaagaaaacaaaaactattggtaactttacgatagctgaggtgaaaatgatggatcttaatttacgaaatgctgttattgcaaatgtttcaggaaactcaaaagaagagcttgaagctacaatttctgacgctattcaaagcggcgaagaaaaaatgctccctggacttggtgttttatttgaggtgctttgggaaaagtctccagaatcagaaaaagaagaaattctgacaacgcttgaaaacggtttaaaataaatagccttgtcctatgtacagcaaaaagctcattctcctaggagaatgagctttttttaattatacgtaattgcgttcaccgtatttcggtctaagcgtttaattacttccgcaattaatttaactgcattttcataatcatcacgatgaagcatcgctgcatgagaatggatataacgagttgcgatcgtaatcgaaagtgctggcaccccgttagctgaaatatggatagaacctgagtccgtaccgcctccagcgattgcatcaaattgatatggaatatttaattcatctgccacatctaccactgtatctcgaagtcctttatgagaaaccatggaagcatcatataaaatgatttgcggaccctctcccattttagaagatgcttctttatcagaaacaccaggtgtatctccagcgatgccgacatcaacagcaaatgcaatatccggttcaataaagttagcagatgtttttgcacctcggagtccaacttcttcttgcaccgttcctacaccatacacaacattttcatgtttttcattttttaaagcttttaatacatcgatagcgattgcacaaccaatacggttatcccaggccttcgctagcagcatcttttcattgttcataaccgtaaattcgaaataaggtacaacctgatcaccaggttttactccccactccgctacttcttctctgctagaagcaccaatatcgatgaacatatctttaatgtcaactggctttttgcgaacttctgggggcaggatatgaggaggctttgagccaataatccccgttacctctcctttagatgtcacgatggttacgcgttgagcaagcataacttgagaccaccatccgcctaccgtttgaaaacgaataaagccgcgttcatcaatttgagtcaccataaaaccaacttcatctaagtgaccggctaccataattttaggcccttgttcgttgcctactttttttgcaatcaaactgcctagcccatccgtcgttacttcatctgcataaggtgcaatatatttcttcataacctcacgcggttcacgctcatttccaggaattccttttgcatctgttagtgctttaagcatcgtcaatgtttcatctaactttgtcatatggattacccctttcatatgtatacctctattatagctaaaaagaggttgaagtaaaatttcccatcactttatttctagtatccttgttcttggcgtttaaaattcacttcattttttgagatgtacgccttttcgatatgttcagcggaaaaaccaaacatatcgccaagcgtcatgtaagatacaaacatgtccacatagttttctttcgactgatcctgctcgaaagcagcaacttgtgcaaacacctgtaaaaattgtgctgtttttgaatcacttgcttttgcatttggtaactcagttaaatcatcgtatcctttttcaatccctaaagaaaggataaaatgtacgccgtccacaaattcttctaaaataacagcgtcttcagccggaggtttgacgctccaaaatttgaagcagcgcgtttcgtttgccagctctcccatttcgacaagcagtgctaaaagctttctcggaatcaaatcttccttttgaagctcatgcttatcctctatatgctgatccagctggcgctgcatggtaaatagctgttgtaaattcaatgtaatcactcctgtaattatgtatatcttcttctttttaaaccaataaagaaattatatcaaaaatcatgaaactttttagaaactcgaacgtaaagtaagaaaactgtgccttgtaaaggagggagcgttatgtttgttattgttatcgttcgcgtgttcattttcgcgcttgttgcttacacactattaaagctggttcagcattttcgcagtccaaagcggaagcttgtagcagctcaggaacatcagcaattttttgtcgttgacgaaaaaacgaatatccgcaaaaattttctactaacgtataaaggtattttatttgaaggagaaaaatacagcaatcccaatgaaccagaatctttgtcaattacaatggtgttaacagatccatctcgattacatgaactgcaaaaacaagatttcaagctgctggaaagccacgtacacgaaatgtatccaaatgctcctattcgctggaaaagccccgttcgagaatttttacactgagcacaaaatcatttgtgctcagctgataacaaaaaagaaaagtaaatcaagagcagcaagaataggaaaacctactgtaaacgatgtatgcttcgttttatgacgatagcaatacataccaatcagtcctccaagagctcctccgatagcagctaccgtccacagtgtgctttcggcaattctccactcatgtcttttcgctttttgtttatctctatacatcattcctacccctactatattaatagcaataaaataggtaagcagcagttcattcatgataggtcctccgatagcaaaaaagcctcatcatctaaagatgacgagactttatattcattacttatctaagccttttttagcagcagttgctaattcagcaaatgctttttcatcagctacagctaagtcagcaagcattttgcggttaacttcaatacctgctaattttaaaccgtgcattaaacggctgtaagaaagaccgttcatacgagcagctgcattaatacgtgtgatccataatttacggaagtcacgttttttctgacgacggtcacgataagcatacatgtgagatttcataacttgctgattagcaactttatataatctatgcttcgaaccgaagaaacctttagctaattttaaaacttttttacgacgtttgcgtgttactgtaccgccttttacgcgtggcataattgtttacctcctgtattgtttctatctcaacccaaattacttaatgttatctaataagtgacggatacgtttgaagtcacctttgcttactaaagaacctttacgtaatttacgcttttgttttgtagatttgttagcgaataaatggcttgtataagcacgagcacgttttaatttaccgcttccagtctttttgaaacgctttgcagcgccacgatgtgttttcatttttggcatggggtgttcctcctcgttctattacttttcgtttttaggtgccaagactaagaacatgctgcggccttccattttaggagccgattcaactgaacttacatcttcgcaagcttgtgaaaaacgttcaagtactttttggccaatccctttatgagtaatggcacgacctttaaagcgaatagacgctttcactttgtcacctttttcaaggaacttgcgtgcgttacgaagtttagtgttaaaatcatgttcatcaattgttggacttaaacgaacttcttttaagtttacaactttttggtttttacgagcctctctttctttacgttgttgctcatagcggaatttaccgtagtccataatacgacataccggcggtttcgcatttgcagcaaccattactaagtcaagatttactcgtgaagcaatttctaatgcttcattttttgatttaattcctaattgttcaccgttttgatcaattagacgaacttcgcgagctcgaatgccctcgtttaccatcatgtccttgctaataagtagccacctccaaggtttaatgagcgaatacgcttgcttagaccgattattaactcacacaaaaaagtgtgagtacatactgcacccacacttctatcgttttaattaagatacgatgtacctgctaactgctctatgcgtcactcaggtgagaagcgggtgcttcttcttctgtataaacaagtattcaattacttaagctattatagtatcaacaaagacaaaagtcaatgatttcgttcttttttcacaacaaaaattattgtatcaaaggaaaaacatttatgcaacagttttttataaatgttagataaaaaagcagagaatttcaattctctgcttttttcattagcgagatgcttctgcttttacattttgtaaaaaggcttggaagtccactgtttctgaattctgctcaccgtatttacgtacgtttactgctttatcttctacttctttatcccctacaacaagcatataaggaattttttgcatttgagcctcacggattttatagccgattttctcatcgcgagaatcaagttccacacgaatacccgccagctgaagctgttcttgcacttcttttgcatactcaaggtgaacggtaggtgataccggaatcacttgaacttgtacaggtgctaaccacgttgggaaagctcctttgtattcttcgattaagaaagctacaaaacgttccattgttgacaccacgccgcggtgaataacaaccggtcgatgttgttttccgtcttctcctacatacgttaaatcaaatcgttcaggaagtaagaaatccaattgaaccgtagatagcgtctcttctttaccaagcgctgttttaacttgaacgtctagttttggaccgtagaatgccgcttcgccttcagcttcataataatcaaggtcaagctcatccattgcgtcttttaacatgctttgtgctttttcccacattgcatcatcatcaaagtatttttctgtatctgcagggtcacggtaagatagacggaatgaataattttcaaatccaaaatctttataaaccgcttcaactaagcgaactacacgaataaattcttctttgatttggtcgggacgtacaaagatatgcgcatcatttagcgtcatgcctcgaacacgctgaagtcctgataatgctcctgacatttcgtagcggtgcatcgttccaagctcagcaatacggattggaagctcacgatagctgtgaataccttgtttgtaaaccatcatgtgatgaggacagttcatcggacgaagaaccaggtcttcgttatccatttccattgcagggaacatgtcatcttggtagtgctcccagtgaccagacgttttgtaaagttctacacttccgagcactggagtgtaaacgtgctgataaccaaggcttacttctttatctacgatataacgctcgataatacggcggatcgtcgcaccttttggaagccataaaggcagaccttgtcctactttttgagaatttgtaaataagtttagctctttaccaagtttacggtgatcacgttcttttgcttcttcaagaagacgaagatgctcgtctaaatctgcttttgtaaagaatgctgtaccgtaaatacgctgcagcatttgattatcgctgtctccgcgccaataagcacccgccacgcttaatagtttaaattctttaattttgcctgttgacggcacgtgcacacctcggcaaaggtcaaagaattcgccttgttggtaaatcgtaaccttttcacctgctggaatcgcatcgatcaattcaagcttcagttcatcgccaacttctttaaaaagttgaatggcttcttcacgagaaacttcttttcgttcaatttcaatatttgaattaacgatttttttcatttctttttcaattttacctaaatcttcaggagtaattgattcttccatatcgatgtcatagtaaaaaccgttttcgataaccggccctacacctagctgtacttttgtatctttgtataaacgtttgattgcttgagccattaaatgcgctgtactgtgacgcataatttcaagcgcttcaggagcatcttgcgtaatgatttcaagactgccatcttcttcgattggcgtacgtaaatccagcagctcgccgtttactttgcctgctaatgcttttttctttaatcccgggctaatagaagccgcaatatcttctgttgatgatccttttggatactctttaacagctccatcagggaatgtcattttgattacttctgacacaactttccactcctttaacataactgaataaactttttgtaaaaacaaaaaactcgtcccttatcaaaagggacgagttgtgtatacacgcggtaccacccttgtttcctcttcgtatcttggataacccaaagaacccgaagcggctcgaggttttataacggaaattccgtcagtaattactagaggctctgctcgtttactactgaagtttagaggtggtaagaatatattccgtgttaggagattttcagcctagatctccctctctacaaaccgtaaatatagactcatgtcctcatcataacttgtaacatatagctgtttttcaatatgcatttattatattcattttcaaaatagaaatcaacctttcacgttatattttgcttttgatcaaaaggaaattcatttttttcgtataacataactttttcttggaagatattttgaatggtataaacaaaatcatgatcatgctggtcgctatacagatgaatagcagctggagataaacttagcaaaggcgcgataatagttgagtctatgtataatgattcttgttcagataaaaaggcctctgctagagctgcacattcacgttcaggaacatatctactgttgtggtcgtacaacacaaacttgtttttattcacgtgcattacatacacgttacctgtagatgactgtctttcattagctgcttgacgcagctgatgaataagaatttgatagtcttgttcaagcttatattcatcaatcgccagctcggcataatagcgcagccgctcttgatattcttttaaacggaattggagaaaagactcaaaggtgaatgttacattatgaatgaagaaatcttgaagagcctggcggataagtaattctcttggaagagaaaatgttttttgcggaatttcgcctctctctccttccataatcccccccataatttgaagcagcaaatcttgttcttcctcttctgaatagaaaaattgttcttttaatatgtttaccatcatctttttttctttcttttttaaaattacgtgcgttaataccggtatcaccatgtcttgtaaaatggcctctctattgtatgtctcatcaatgactaaaagctgattattcaccagcttcaagcactgtgaaccatatgataaagcgcttcgcttcgcgcataaagactcatatacaatgactgcgtcttctacatatttaaagaatattttcattcctcatagcccccctttggacacgctttattaatgtatatggggcaacatgcaaaaaaatgagcaagtcgttacaagaaatgtaaaacgacctgctcatctatttcgtttattctctccattcatttcaacaggaatggctagagacttaattcgttccatgacacgagcggcttttagctcttcctgctcgcctctttgggtataagtcaaatgatgttgaagctctttaaaatttaaattcgagctgaaaaatgtcggcaaattttcgagcatgcggaattgtaaaatggttccgagcacatcgtctcgcatccagctcgttacggattctgctccgagatcatcaagcataagaaccggtacttttttaacatactctattttctcattaaagctttgatcttgaaacgaaccttttaactcacgcaaaaactccgggacgtataaaattgtggacttcactttcttttcggctaacgcattggcaattgctccaagaaaatacgttttccccacaccaaacgaaccgtgtaaatataaagctttcattttcttatttggctcatattctcgaacaaaatctcttactagtttaatggcttcaaatcttccctgctcaatttcaatatcagacatcgttgcctgtaaaatttctttgggcacgtacatacactgaataaaagattcttgttctttccgctcatcttcttgtacttttctaggacagcgttcatactgtaaatcaatattacggccttttacaaccagctgagggtgataccccttcaccatattgacacagctttgcagagaaggacacttgtcacagcatttgctttggtcgataaattcatgcatcttcatcagacctcggtcaaccatttgctcatctaactcatggcgatgctcttgcagaaacgttttaacttcgggattagatagaatactgtttcttaatgcttctaagcgtgctttaaaatcctttttgttcaccaactgatttagtgaatcattgataggcttcatctttttcacctcatctctatcatacctgctttttattctttatgcttttgttttagctcttgatctaactgcttgagctcttcttgtagctttcgtttttcttcttcaaatccatccacttcttttgaaggctgctttttctcttctttttcttcatcgctcagccactctggtaccatttctttacgcacaatttttcgtccagccgtttttttattttgctttgcttcggtccaattctgatattctttctgttcatttttagctaaattcatggcatcttgaacagtttgtacctttttgcgcgcccagtgtccagcaattttctctacatagctcttagataatttcatatcggatctcagcatcacgtagtaaatcagaacatttactacccctggtgaaagcttttggttaaacatcacttcttcgatcatttgcaaatctgcttttgaaggctctgctcccccggaaaactcgatcaaaagctgtcgaggagaggtcacttcaagctgttgaataagctgctcttcctttgtctgcggctgcttttcctgcatggtacgaagcataggcggctgaatttgttcgcttagatttggaagtgcttctccattttcaaattggtaaaaggactgcgctgcttttctaagcaattcaatatcaacttgatcgttctcatttagcgaatcgagcaccacatttttcatttgaagaggatcaataccgtataaaaaggctagcttttcaatcgcttgttttactttagatgtaatggacctttttgaaatcattgaatctgttagacctgctaaaaataaatcaaaatcaaaggaatccaggctcatctcaatagaagcgcgtttggaggaatccacaaagtccgtttgagcatcgggagaaaatacatccttgctttcagactgaaaacttggagccagctctgttgctttaaccgatttaaatacatcgttaaatgaatgcgtcacatctttgaacgattggtcatcgacgagtgaatcagaaaaataattttttactttttgaaagatagattttccgagtcggttatataaatatacatttaacacgccatcgttaaaaaactgatggggcgtcagaggaggaatgagctcataaataaacacacgaacatcatcttcttccttaatatatgtttttaacaaaccaatgccttctaattttaaccgctcatggtaaatagctttcaaattaatttgcatcattgacattagatgatgatgcgtagactctttcccccataaacgatcttgttccagctcgctccataacgtcatatacagaccaaagcacgttgtacccaccaacggctgatagagcatggttaaaatctttcggtcgtattcctgcagtatgccgttcgaacgaacaacataacgatcgaccggtatcatttctttccaatgttgttctttcatgtcgttccctacctacttttaaagtaatagaaatgacaaaaaaagagcctaaagaatacttcaatagctcttttacagtcgttccttcttaattaaatcttttaattcatcaataaatacattgatgtctttaaattgtcggtatacagaagcaaatcgaacataagagacttcatcgatagcagctaatcgctccatcaccatttctcctaccacatctgactgcacctctgatgtaccctgactgcgcagctctgtttcaatatcgtgtacggtatcttctaattgttttaagcttacttggcgtttttcgcacgccttgattaaccctcgaaggattttgtctttgctgaactcttctctcgctccatctttttttacaacaattaacggaagttcttctactttctcaaaagttgtaaaacgatagtgacactcttcgcattcacgtcttctacgaatagagcggccttcttctacagggcgcgagtccagcactctcgttccattgtaatgacaggatgggcacttcatattctcagctccaataataaaccttgtttttctttttgttttctcttatataagttaatttccatctatgttagtcggctattcaccatttattatgatttttatcatcatttcctttaacaaacacgatgctgtattaaaggatttgctttattccatcttatagaaaacaaggcttgaatacaagtaaaggaaaaggaatttccccattttatttcctgaaattcaaaaatgataaggaacttacgaagaaagaggaataagtttttgatcaaagctcttataaagcgtacgtacaagttctttactaaaaccaaaatcaaccggcaccacttttgattctgttgtagcagaaaaatcgatagcggtttcaagaggacgtacgttaataatggtaatcacaacaaaagcttttcttccttttacaacgtttaagctaatctctcctcgctcttcatatgcagcaagtatctctatcccttgcatgtgcttcaacatttcatgaacttgcttaaatgcattcccggccgttgttttgtaataatgcgtttttagagtcggatctgaatggtgatcgcttgtttctacatgattagaaaataaagatttaactgcttgtactacccccatgttcttatcccctttgtgtttgcgtattaaaaatttatataccaaaaagaggtgtgtaatacacctcttaacttacgtaatcaatcgacactattaaagtgcattcgctttagtttgttttacctgaacaggacccattccacgtggtaattcaattgtttcacgtgtctgtgcacttagagcatctgcaatataatctgctgcgattgtaggatctaaatgaccacaagtataaacatcgatacttgcataaccatgctctgggaagctgtgaatcgttaaatgtgattctgaaataataacaacgccacttacaccttgaggtgcaaatttatggaacgctacttcgcgaacttccgcaccagattttaaagctgcatcaacaaacgttttttcaatataatcaatatcatttaacttatcgaaatcgcatccccataattctgagatgacatgacgacccattgtttccataatgatatttccccctttaacaatttttaatcgttaaacatgaagttctttcgccatatagcatgttaactaccacgggggaaagttagtccaaagaggtcctaaccctttaagtagccacatcaccgaaaggtacacaagaagttcacgaaacatagtatactttgtttacatttattttgcaatacgtgttttgattttattaaagattgttcttgcagatagacctatacaaattacccctgtattctcgtgagacagtgtgtaaaagctgctaaacgactattaattttttattaaaattgaggaaaataaacactcctttgcatgcttatcttattgcttttccctattcttttgaataaaaacaaaaaaaacagggcgacagctccctgtttttttaaaagcaatcaatagctttcttagcttactcttatttttgatccattacgcatttctgcagcaatatatcttaccaaatcgactacgcgctgcgagtagccccactcgttatcgtaccaagctaacactttaattttatgatcttccattacgatcgtggatagtccatctacaatagctgaatgaggatttgtattaaagtcaattgatacgagtggttccattgttaaatttaaaatattctttaatggtccttcagcagctttaataaacgctaaattaacatcttccatcgtcacaggtttccttacatccacaactaaatcgacaagcgatacgttcggcgttggcacacgaagcgccatcccatgaagttttccttttaaatgaggaagaactaatgaaagtgccttggctgctccagtggttgtaggaataattgattgagcacacgcacgagctcttcgcaaatctttatgcggattatcgatattcttttgatcatttgtatatgcatgaacggtcgtcattaaaccgttttcaattgtgaacgcttcgtctagtaccttgacaactggagctagacaatttgtcgtacaagaggcattggaaataatgttatgctgattcacatcaaactctcgttcatttacgcccatcacaatagtgatatcttcttgtttacccggtgccgttaagacaacttttttcgcacctgcttcaatatgtaactgcgctttttctcttgaattaaattttcccgttgcttcaacaactagatcaatcccaagctctttccaaggcaaattcagcggatcacgtgaatttaatagctgaattcttttaccgttaacaattagcgcatcatcatcacatttgacatctccattaaatgctccgtgtatagagtcatatttgattaaatgtgctaacgtttctgctggataagatgcatttattgcaataatatctaaattctcctctataatcgctgtgcgaaacaccattcttcctattctcccaaaaccattaatggcaatacgtgctttcatggctatacccctctctatatgtgttatactatttaactttttatattgaatagtataacataaatatttaaaaagtgaataatattaattttttttaataaattattttaattaagttttactatatgtatatagcgagaacagatatttaacacattcttttttagaagcccttaaatattcccaataaaaaaagagtgaatgcaatcattcactctttaatctagccatagggctaatatacttaaaagctgttgttttgtttcttccacaggaccgttgttattgatcaccgcatcggctaaggctactttttgaatcaaaggcagctgtgcatggatacgcgcataagcatcctccgtcgagaggctattacgcgactttaacctttctagctgcacagactcatcgacatatacaactactactttatcgactaaatgtgtcaaatcgctttcaaacagcagcggaatatctaatacaacggcttcgtaaccttcctctatatagctttccttttgagaaagcatttcttttcttacggcaggatgtacaattgcattcaactttttacgttcttcctcttgataaaacacaatttcccctaaagccgctcgattgatctccgcgttctcgtgaagaatagaacggccgaacgtctcgacaatttgtttgtatgcttcttttcctggttctacgacttcttttgcaatgtgatcagcgtcgattactggaatattgatatctcgtagcattccggttaccgtacttttcccgcttgcaattccgcctgttaatccaattacaattgacatcggcctctcctttatctctttatttaaaatctaaaaatacctaaaataatgagcagaactcctggtacaaatgagaacattttcatccatgataaacgtgaaaaaaccttgccaaattgtatgcccgcacttaaaaaaagagaactcataagagctacagcaattgctagagcatacggcgaataacctaataaagccgctccaaaccccgctccaaatgcatcaagagataatgcaattccaagtataaatgcttcaataccattgatggaacctgaattatctaaatctgctgcaattggcttttttaatacgttaatgactaggccaattgacttaatttcaatttttactaatgttttttcttctttcactcgaggtgaatctgccggacaaaaaaactggtataaaatccacatcccaagcagaacaagaatacctccgcctactttatttagtacatccactgaaaatagatgcgtaagtacttttcctaaaaacatagaaaacattaaagaaaatgctgagcaacatgaaataataaaaatggatttcagcgggattttcacctttcgaagtccgtatgtcaggccaacgctaaagctgtcaagacttacggcaaaagcaagaataagtaaagaaaatgttatcatgatgagaggactcctttcctttctgtctatacgtagtatatgaaaggagcccatccattgttattttttagccggctgacaatttgggcagatatgtgttcctctaccgcctacaacaaatttttcaattggggtaccgcacattttacaggattcgccttttcttccgtacacataaagctgctgctgaaacatgcctatttgtccctgtgtatttacatatgtgcgaattgtgctgcctccttgtttcacagcttcttgaagagtcgctacaatttctttgtacaatttttcatactcttcgtctgttaattggctggccactcgttcaggatgaatccctgcgcgaaacagtgcttcatctacataaatatttccaagcccaaccacgacattttgatcgagtaaaaccggcttgatttttcgagaggtttttccgattctcatttttaattgactaggattaaatgtttcgtcaaacggttcaggtccaaggccaataagaggaggaaacagatcttcctctccctttttaaataagtgcatagtgccaaatttccttacatcccggtatcgcaattccgttccatccgtgaagtgaaaaaagacgtgtacatgcttatctggttcttctgcattctcatggagagcatatttaccttccatacgcaaatgagaaaccatcgtataatcatcgagcacaattttcaaaaatttacctcttcgttcaacatctcgaatggtttgtccaacaagcgcatcgcaaaactgttcaacttgttcagggcgtttgataatattaggccatttaactgttacacgctcaatggtctttccactggctaattcaattaacgtacgtctgacggtttcaacttctggtaattctggcacgtttgtcacatccttttccactactttgcttcgtaccaagtctttccgtaagaataatctactttcaatggaacttctagctctaaagcgttctccattacttctggtacgattttctctaaaattttaatttcttcttctggggcttcaaaaatcagctcatcgtgtacttgaagcagcagcttagcctgaaggttttcatcttttaagcgcttatccatttcaatcattgctttttttataatatcagctgccgtcccttggataggcgtattcatagccgtacgctcagcgaagctgcggaggttaaagtttcggctcgtgatttcaggcaagtaacgtcggcggtgcaagagcgttgttacatatcccttttcttttgcatctcgtacaatcgtatccatatactcctgtacaccagggaagctttttaaatagcgttcaataaaagtagccgctgcttttcttgtaattcctaaactttgcgataaaccgtaatcactgatgccatagacgattccaaagttaactgctttagcctgacggcgcatattcgacgttacttcttctctttcgacgtggaacacatccatcgctgttttcgtatggatatctaagtcatgcttaaacgcatcgattagcttttcatcatctgcaatatgagccagtacgcgcagctcaatttgtgaataatccgccgcaaatattaaccaatcaggctgtgaaggcacaaacgcacctcttatttttttgccttcttcaagacgaatcgggatgttttgcaagttaggatctactgagcttagccttcccgtttgagttaatgtttgattaaagcgggtatgaacttttccatcgctttcatgaataaccttttttaatccttcaatatacgtagactgtaattttcctagctgacggtattgtaaaatctctgggataatatcatgggtactagctaattgctctaatacatcagctgatgtggaatagcctgtttttgttttctttatgactggaagctgcattttttcaaaaagaacaactcctagctgctttggcgaattaatattgaattcttgtccagcgtattcgtagattttcgcttcaattttttcaagctgttctcgaagatcttcgcccatttcatccaaacgcgcgcggtcaattttcaccccttgatattccatatcagcaaggacaatggcaagaggcatttcaagcttctcaaacagctcaaactgttcattttctaccaattctttttctagcacttcttttaaataagctacggcggctgcttttcttataacatgctcagctagctgatcagcttctgcaatacttcgcttagctccttttccatacacagcttcatctgattgcacttgatggtatccttttaattttgcaattgtcgctaggtcatcatttgcctcagcaggattcaagatgtaagaagcaatcattacatcatgttcaattcctttaatttcatgccccgcccattttaacgatacaatcgtacgtttcccattaaacaccgtcttttttacacgtccatcttctaaccatgctttaaatttagaagatgaaagagctgtatctttatcaataaaatagtggccatttttgttgctgattccaaaaccgagcagctgattgtgatggtagttttcttcatacccttctacgatcagagctgcttcgcttgttaacatatcatcgtgaacttcctgcgctacttcaaacgttagttcttcaaaatctgcttcctcttctgctgattcaccaaatttagcaagcaaagaattaaacccaagctctttaaataatgagatgacctttgaagattcaaacccgtcatactttgcatcttctacagatacttcaagaggcgcttcgcaataaatagttgcaagctttttactcatgatagctgattcacgattatcttctagcttttcttttaattttttaccgctgacttgatcgatagattttaatacattttcaaccgtttcgaactcttttaataactttaaggctgttttttcgccgactccgggcacgcctgggatattatctgagctgtcccccataaggcctttcatatcaataatttgtgcagccgtaataccatacttctcatcaatggctgcaggcgtataggaatcgacatccgtaattccttttctcgtaatatctacggttacatgttctgacacaagctgaagtaaatctttatcaccagaaatgacttttacggccattcctttttgttcagcttgttttgaaagcgtaccaataatatcatctgcttcataatcaggcagttcatagcgcttaatcccatatgcatctaataactcacgaataaagggaaactgctctgaaagttcaggaggcgtcttttgtcttcctcctttgtattctgtaaatgttttgtggcgaaacgttgttttccctgcatcaaatgccacaagtaaatgtgtcggcttctcttcctctaagatacgtgtcagcattgtagtaaagccatatatggcatttgtatgtattcctttatcattgtttaaaagcggcaaagcaaaaaatgcacggtaggcaatactattcccgtcaattaatactagtttttgtgtcattcatgttcctccatttcgctctcttcttatcttacctttattttagcaaacaataagctttaaggacaaaaagtaatcttgagttcaacgttttattttcatgtggtgataagatctgtacatcataaaataaaaacaccgcctagttattttaggcggtgtaacatgtgaatggatagaaattgtcaaaaagaatcggcgaaaatagcacggttaaagctattttcgccttacacattggctccttggatgaaggggtttccatgaaaaattgtatcaattaattattaagctacattaaataaattgtaaaaggaacgtaaacattttacatctgcggcaaatacttgtgcagcttcaccgaaaaagttgtccctttattgacttcacttttcacttcaatttcccctttatgagcttcaacaagatgtttaacaattgctaatccaagacctgttcctccggaattacggcttcttgccttatctactcggtaaaagcgctcaaaaatacgtgaaatttcatcagaatcaataccgatacctgtatcttgaacatgaaccgtaatcgtttcttcttcctcttcaagcgaaacgtgaacagttcctccaggcattgtatacatgagcgcattgccgattaagttaacaaacacttgcataaggcgctgactgtcaccatcaatccacgcttcttctggaagcgtatctaacgttagcgtgatttctttttcagttgctcggtttgatagcacggtcgtcacttcgtaaagaagcgtattcaaatctactgaatgaatgcttagtttaaagccttgctgttcaactttagacaaatctaaaagatcttgaatcaagctctccatgcgctgactttccgttaaaatgatcgatagaaactgctgacgcagctgtggatcttccatggcaccgtctaacaatgtctcactaaacccttttatagacgtaataggagtttttagttcatgagacacattcgctacaaagtcacggcgaacttgttctagtttttttagctcggtaatatcatgaaaaacaagcacaatccctttccattcatcgtttaagccaataatcggcgctccgtaaacatcaaaatatcttcgttcaatatttaaaggcaggaccacttgttttcgaacctttacttccgtcataaatattttttccacaagcttaatgatttctctatgctcaaatacctcgtaatacaaatgataaaggaagtcatccggatgtatatgaaactgctctttataagctcgattcactaagtttatatagcctcgactatcaataagaagcatgccgcttcccatattttcaattagcgtgcgcagcctgtcctgctgcatttcttgattagtgatagactcttgcagattacgagcaagtgcgttaatagactgactcagcatccctgtttcatctacataatcttcatatgtacgagctttataattcccttttgcaagttccatagccactttggttgccgattcaataggacgggtatagcgtcccataatctttacacctaaaagtaaaatcacaatcaaagctagacctaagcttccaataagaaggccccaaatttgctgatttacctgttttaatgaatcaaacgatgtactcagcacaacaaatccctcttgcttaccttctataatcagcgggataccatagtaatataagtcataatcttctttaatttgatcaaagctttttttactgtttaactgcttttttaatacttgttggattacgatacttttttcgattctttgctgcttgctgcctggatttgagtcaactaatatttttccgtctttttgaacgatagtcgttcgtacacttaacgaatggctgatttgatcaactttagattttaaagcaggacttgtgataccttcttcgctaatgtacatttctacaagctttgcctctttttccattcgctcttgaaacgtctgaaaataaaagtttttaaacaactgtcccagcagcaggccaagacctactaatacaataataataagtactaatagagccaaaagtagccttgaacgaaatttattcatctacctttggttcctccagcttatatcctaatcctctaatcgtttttatataaacaggttttcgcgtattgtgctcaattttctcacgcaaatggctgatgtgaacatctacaattcgcgtatctccggcaaaatcataattccacactgcacttagcagctgatcacgagttaatacccgtcctttgtattttgccaaatataataataactcaaattctttcggagtaagctcaagctgctcttgattaaagtaggcctcataatgatctggaagaatttttaaatcaccgatcatgatgcgctcgccatcttcctcttgttcattttcctgagcaatgatttgtgttctgcgtaaaatggcttttacacgcgctactacttctcgagggctaaatggttttgtcatgtagtcatctgcgccaagctctagccctaatactttgtcgaactcatcgtcttttgcagttaacattaaaataggcgtcatcactttttgctgacgaagctttttacaaacttcaattccatccatcttaggaagcatcaagtctaacacaattaaatccggttttccttctagtgccttgttgtatccttcttccccgtcttcagctgtttctactgtaaagccagcttgctgtaaattatattgtaataatgttgaaattgattgttcatcatctacgactaataatttcttactcatattaacgatataagcctccatctagttaaattaaaccgcagcttcatccaaatgatattattttctatttatcttctcttatcatacaatgttttagcctcgttctccaatacatttcaacattttcagaaaatatgaccaaacagtttcttctatatttataaatatttaaggtgttttaaaaattttcaaagtcgtgtgtctctactgatggaagtctaaacggcggataaacaagaaaccgcgccgttactactttctctttttgctcattgaccgcttccacctcaatcgtaacagttctagaagaaacatctacctctgtcacttcaaataaaaattcaatcgtgctataatgatgaatctttttggggaaggctaccgtatgttctgcaacgtggcttccaggtccaggcaaatactttgaaatggctgctgtcataataccggtaatcataatacttggcacaataggttttttaaaaggggtctgagatgcgtaatcatgctgaatgtataaagggttagaatcatttgtcagccctaagtacaataagatgtctttatcttcaattcgttccgttagcgttaatttttctccaacttttatatcttcaatacttcggcctattttttgttttttacctaataccatcatcattccaccttttgtataaagtaatagcttttctttatatacaagaaaaattcgaggtttccctcgaattttccttgtgactattgtttgaatattgataaaaacctatactcaaacctattttattgtattaagctaatacacccatgacagttttaactgattttgctgattgatctaaagaagctttttcagactcagtcagttctaattcaattacctgctcaattcctgcagctcctaatacggttggaacacctaagtagatcccgttataaccatattcaccctctaggtaagcaatcgctggtaaaatacgacgctgatcttttaagatcgcttctgtcatttccactaaggaagcagcaggcgcgtagtatgcacttccgttacctaataagttaacgatctcgccgccgcctttgcgtgttctttcaacaattgcttcaagacgcgcttttggaataagcgtttcaagaggaataccgccagcatatgagtagcgtacaagaggcaccatatcgtcgccatgtccaccaagtacaaaacctgtgatatcttttactgaaatgtttaactcctgcgctacgaacgtacggaaacgtgcagaatctaatacgcctgattgaccgattacgcggtttttaggaaaaccagattctttaaatactgtatacgtcatagcatctaccgggtttgttaacactatgatgtgacagtttggcgagtatttaacaacttcttgagtaacagacttcatgattttttggttcgttgttactaaatcatcgcgactcatacctggcttgcgcgcgataccagctgtaataatgacaatgtcagaatcagctgtgtcttcgtagttggctgttcctgtaatgttagcgtcaaatccttgtacaggacttgcttctaacatatccagcgctttacctttagctggattttctaattgcggaatatcaactaatacaacatcagctaactctttttgaccaattaaaaaagcagttgtagctcccgtaaagcctgctccgataacagatacttttttacgcatatttgccattataattcctcccctaaatgaatagctattaaactgttacttgttttcctagattgctaattaattcatcagcgaactctgaacacttcacttctgttgcaccatccattaaacgtgcgaaatcatatgttactacttttgaagcaattgttttttccattgatttcataattaaatccgctgcttcgttccagccaaggtgttcaagcattaacacacctgataataatacagaagatgggtttactttatctaaaccagcatatttaggtgctgtaccgtgagttgcttcaaagatagcatgtccagtttcatagttgatgtttgctcctggagcaattccgataccaccaacttgtgctgctaatgcatctgaaatgtaatctccatttaaattcattgttgctactacatcgaattcacgtggacgagttaaaatttgttgtaagaagatatctgcaattgaatcttttacaataatttttcctgctgcttccgcttctgcttgagctttgtttgcagcctgtgcaccttctttttcaacgatacggtcatattgagcccaagtaaatactttatcgccgaattctttttcagctagctcatagccccaatttttaaatgcgccttctgtatatttcataatgttacctttgtgtacaagcgtaacagacttgcggccttgttcaattgcatagttgattgctgcacgcacaagacgctctgttccttcagaagaaataggcttaatacctaatccagaagtttcagggaaacggattttatttacgcctaattccgtttgtaggaatgaaacaagcttttgtacttcttcagaacccttcgcatattcaataccagcataaatatcttcggtattttcacggaagataaccatatctgtatcttcagggcgcttaattggagaaggtacgccgtcaaagtagcgaacaggacgtaagcatgtgaataagtctaattcttgacgcaatgccacgtttagagaacgaattccaccgcctactggtgttgttaatggtcctttgattgcaattatgtattcgcgaattgcatctaacgtttcttccggtaaccattcgccagtttgattaaatgctttttcacctgctaatacttctttccaaacgatttctttttcaccattgtatgcttttgcaaccgctgcttctaatacgcgagaagctgctgcccagatatccgggccaattccgtcaccttcgataaatggaataattgggttatttggtacgtttaacacgccgtttgctacagaaatttgttcaccttttgtcatgagaatgacctccttaaaaaatttgtctactttcacttatggaaaagtgctcaacgaacgtgagcaccttcgtcacattgtttagctgcgctcttcaagcggaatgtacgtttgttttccaggaccgatataatcagctcttggacgaatcaaacgattgtttgaatactgctctaaaatgtgagcaatccatcctgatacgcggcttacggcaaagatcggagtaaatagatcgtgatcaatccctaagctgtggtatacagaagctgaatagaaatcaacgtttggcggaagttttttctcgcctgttacgatctcttcaattttcactgacatatcgtatagcgttgtatctcctgcttgtttggtaagtttttcagacatttctttcaagtgcttggcacgaggatcaccctgctgatacacacgatgtccaaatcccataatcttttcttttttcgcgagcttttcgcggatataaggttccgcgttttcaactgtttgaatgtcagacaacattttcataacagcttcattcgctcccccgtgaagaggaccctttaacgctccaatagcggctgtaattcctgaataaatatcggataacgttgccacacagacacgagctgtaaaagttgaagcatttagctcatgatcagcatgtaagacaagtgctttatcaaatgcctctacttggatatcagttggctcttcgccggttaacatatataaaaagttagcggcaatgctatagttttcgtttggttcaattggctctaatccgttacggactcttgaaaaagccgttaccaccgttggtaattgtgcttgcaaacgaacagctttgcgataatttgcttcttcatccattaaatcagcttcaggatcgtacaaccccaatagtgatacgactgttcttaaagctgccattggatgaacatctttaattggataagttttgaaatgctctaagacttcttggggtaatttagcgttttctgctagtaatctagaaaacacagataattcttctttgttaggtaattttccgtgccatagtaaatacaccacttcttcaaatgttgcataattcgctaaatcatcaatattgtagccttgatatgttaaagtgtcatcaataattgaacttactgctgacgttgtagcgactaccccttctagacctcgagttgctgtcataaatctccactcctttacagaaaaaattccccatacctttctgtgtaaaacgtgaaaaacaaaattgagcctctgctcaactagacattaaatgatatacgaagcgcctcttttgaatatatatcttggaagaacattccttcaccccacgtaaagaaaatgcttacatttccatttgtttcaataacacacaaaatcaaaacatctgcatgtgtcattgctttgttacagccctataggtaaaacatacaattgtatgtaaaaagatgcggcctcaaaatatattataaacaattatctgacttttgtgaatcaaaagagagaagaaattttaaaaaaattattattatacaaaaatttctacgaaaaaagttcggttaatttcataaataaataagcgattccagcaccgattaacggacctactgctaccccttgaaacagcgccacagcaagaattgtgccaaaaactaaagcggtcgtaatatgcggatcatcttccaagagtgtaagtccatatttagcaataattgctacagcaattccggctcctagagcaatccaggcatacgaagatttcacagcttctcctaattgtttgaaccctatgtctcctgttgcaattggcacaagaacggcaattgtaataaccgttactccaatattaattccttttgattgtagaaacggaaaaaccttaccgtctaacccgattaattttaaaataagtaaaaatgcaactgcaatgattaatgattgatttttagccactaatccaattacgagtaaaacagctaaaaaaagcatgggttgtgagaacattttactcatcctttctttttttattgtgataaatctaaagcgtattacgtaaatattttatgagtagctttttcttttgttgactatcgtttacaaggaggcctctatttattgtgtacaagcttcatttacatcgactatttcgcttagcttgtgtgttggtaattattgcagcatctatatttcttagttattatgtctcttctctcatatatccatttattatcgcctgctgcatcgctttttttataaatcctatggttaatctatttgaattgaagctgcgtttacctcgctacttagctgttttactgtcaatggttcttatcttctctcttttggccggacttattacgttacttatcacagaaatcattgcaggaagtacgtatttagcgaaagttgttcccacaaatttcaaagaagtggtcatatttattgaaaatattgctacagaacaaatacttccgttttatgaacgtattacttctatgtttaataacttaaatactggtcagcaagcaactattttatcgaacattaaaggggtaggcaaccatatcgctcaaacggtgggcgattttctgcaaaatgtattgcaaagcatcccagtacttttatccgtattgcctaatgcagctactgtgattattttttcattgctggctactttttttattagtaaagattggtacaagctgatggctaaaagcagcatgtttattcctaaaaaagtaagagaaaatggacagacagttgttctggagcttaaaaatgcactgtttggatttattaaagctcagcttacgcttatttcgattaccacaatcatcgttctttttggtttacttgttcttagggttgattatgctattacagtcgctttattgattggcctagtagatattcttccttacctcggaacaggactggtttttgttccttggatgatttatgcctttgccacagataacgtctcatttgctgtagggctttcggtactatatgctgtagtacttgtgcagcgacaaattatggaaccaaaaattttgtcatcaagtattggtcttgatcctctcgctacattaatttctttatttgtaggatatcaattgattggatttttcggattaatagctggccctgtgattcttgttattctaaaaacacttcatacaacgggggtttttaaagaaacgtgggaatttattataggaaaatgaaaaagtgtgtgaaagaagcttctttcacacactttctagttaacgaataatcgtcattcgattacgtccttgaaaaaatcttcttagccacgttaaaagaaaaggcttaacgattctgcgtgtaaacggcagtaaaaagataaagcccacaacatctgtcaagaagcctggaaacagcagaaacagtccgccaaatagtacacacataccatcaaggatttcaccgcttggaacatgtccctggctcatctgacgctgtgccttttgaaaaagagatgttccttgttttttcgctagaaacgcaccaataaaactggtagcaataatcagtaaaaatgttgacattacaccaatgagatgacttgaataaatcaaaatcattacctcaacagcaggtacaataagaaggagcggaaggagcttcctcaccatcatcacctcttcgcttattgaattggctaaacaaaaagagaaggattccccttctcttttttctatcatctacgtgttcttacagtacgcttgcgtgtccgttgtatacgacaccacgtgaagcatcaactgtaatatcttgatcttctgagaatacgcttgttgcattttctacgcctacaatgacaggaatgcttaagtttaaccctactacagctgcatggcttgttagaccgccttcttctgtaataagagctcctgctttttcgattgcactgatcatatcgcgatctgtgctgtttgtaacaaggatagcaccttcagtcatttttgcatttgcttcttcagcagttttagcaataactactttaccaactgctgctttacgaccaattccttgtcctttagcaagaacgtcacctacaacttgaactttcattaagttcgttgcacctgattctccaactggaacaccagctgtaataaccactaagtcgccgtgtgctacaacgcctgtttttactgcgtcatttacagcgtgatctaacatatcgtcaattgtatttacgcgctcaccaacaactggtgtaacaccccatactagagacagacgacgtgcaacagaatcgtttgctgcaacagctacgattggagattgcggacgatatttagaaacgattttcgctgtataaccactttctgttggcgctacaattgcactagcgtttaagttaagcgctgtgtgtaccacagattgtccaattgcatctgtaatagatgggccaacttgcttgctgcgctgttgtaaaatctcagagtagtttagagcttgctcagcacgagaagcaattgaatgcattgtttgtacagcttcaactgggtaagaacctgcagctgtttcaccagataacataattgcatctgtaccatcaaagatagcattggcaacgtcacttgcttccgcacgagtcgggcgcgggttgcgttgcattgaatcaagcatttgtgtagctgtaataactggtttgccaagcgcattacattgtttgattagatctttttgtactaatggtacttcttcagcaggaatttctactcctaagtcaccacgagcaaccattaaaccgtctgaaacttcaagaatttccttgatgttatctacgccttcttggttttcgatttttgagatgatttgaatgtgagctgcattgtgtttttctagtagttcacgaatttctaatacatcagatgcgcgacgcacaaaagaagcagcgataaaatcaatgccttgttcgataccgaatacaatatcgcttgcatctttttcagtgataccaggaaggtttacacttacgtttggcacgtttacaccttttttattttttaatgtaccagggttaagtacttttgttttgatttcaccatcagttttattgatgtcgagtacttcaagaccgattaaaccgtcatctaaaaggatttttgatcctacgtgtacgtcatcgattagacctggatatgtaattgagaatttttcagttgttcccactacttctgtcatagaaacaatgatttcagagccttcttctaactcaattgcaccattttccattgtgtttgtacgaatttcaggtccttttgtatcaagtaagatacctactgttttacctgtttgtttcgcagcttcacgaatgttaacaatacgtgcaccgtgctcttcaaagtcaccgtgagagaagtttagacgacaaacgtttaagcctgagttaattagttcaactaatttttctacactttcactcgctggtccaatagtacatacaattttagttttacgcattcaaatttcctcctatatatttactatttactctttagatagggcaaatagctatttcttttactaaccttgtactagcaggctgtgaacaaatattttgttgccctgacttgttcaccttgctttacgtgtaacttatgaaatacctatgtagcgctgaatcaaatagcaaacaaatacacagcactttaacgatgaatttcttcatcgtttgcttcttgttttactattccctgcaattcatacagcaatacttgctgcctgatttgtcttatatatctcacgttttagagaaaagacaaacgctagcacagctgctaataaccataggaaattttttaaaaacactctttttctacttttacttaaaggtttttgctgtctataaaataccacgaagaacttgtaaacacaatagagaagggctatacaaaccgcacaaaaacgcgcacccttatttttcaagagtgcacgtttctttattttatagtaatggcatcgttttcagctacaaattgtccgatttttttgtattttaaataacgctcttccactagctcttcttttgataaattcatcagctcttttaatgatttcttgataatgccctccatgtatccagcttgcgcatcgatatctcggtgagctccgccttttacctctgaaaccatttcatctacaatacccagttctttcaaatctggtgctgtaatcttcatcgtttcagcagcttttttcgcaagagaagaatctttccaaagaatggctgccgctccttctggagaaataactgaatacgtcgagttctcaagcatatgaaggtgatttcctaaacctaatgccaaggctcccccgcttcctccttctccaattacaatgcaaataacaggtacagttaagccagccatttcgaaaaggtttttcgcaatagcttcgctttgtccgcgctcttctgccgctttccctggataagctccttttgtatcaataaagcaaataattgggcggttaaatttctccgcttgcttcattagacgcagtgctttacggtagccttcaggatgaggcataccaaaattacggcgaatattttctttcgtatctttacctctctgatgtccaatcacggtaacaggcacgccattaaacttagcaattcctcctacgattgcttcatcatctccataaaagcgatctccatgacactctaaaaagtttgtaaacaagcgagaaatataatcgagtgttgtaggacgctcaggatgacgagcaatttgaacacggttccatgggcttagatgattgtaaatatcgttttctactttttctaagcgattttctaacttatcaatttcgctagataaatccacttctgtatttttagcaaactctttaagctctgcaatcttgtttcgcaactcaacaattggacgttcaaattctaattcgcttaccactcgatgtcacctcctgctacgtgtatatctaaaatagttgttaacgtttcttttaaatcatgacggtcaataactccgtctagctgaccatgcttcaacagaaattccgacgtctgaaaatcttctggaagctcttctctaattgtttgttcaataatacgtcttccagcaaagccaattaacgcgcccggctcggctaaattataatcacctaacgaagcaaagcttgctgacacgcctcctgtagtaggatgtgtcataatcgaaatgattaagccgccttcatcactgaacattttaagagctgcgctagttttagccatttgcatcaagctcagaacaccttcttgcatacgtgcaccgcctgaagctgtgaaaataaggaatggaacatgcatttccttcgctttttcaatggcgcgagtaattttctcgccgactacagaacccatgcttcccatacggaagtgtgaatccataacagcaactactactttaatgccttcaatatctccttcacccgtaacaatcgcttcacttaaattagttttctcacgatctttttcgagcttttcaagataatcagggaacccaagaggattttctgacgtcatatctttgtcgtattcaacaaacgttccgctgtcgattaagctttcgatacgctctggtgctgtcatttggtgatgatatccacagtttaagcatacttttaagtttttatttaactctttcgtatacattatttttttacactttttacacttggtcataattccttcaggtacatcttgtctcatatgctcagaaggaatcgtagcatattttcgtttttttggagtttttgtgttttttgtaaataaatctcgtaacaaggtgtaacctccttttggttcttttctttatcataagaacctttattcttcctcttcttctactatttacaagttgtgaaaatccgcctcaaatacaaatcaagtgacggatagacaaaaattggacgaattgttcgcttcactttattagttgctatttactttactagatgactgtttgattttgtgtagaaagatggcatgtctctttcgacaaattccttctttcacacttgtttgtagcactgatggtgaagatttaatacagctgcttcatcttttttagctaacgcctctactaattcacttatcagaatgtcgcttggcgctgagttttgttgaaaagtttgagaaaaacggcaaataatcagccagattcggtgtaatagccgattaggctgcaaagaaaacaaatagtcaaacaagttcttcaaacaatcgtcattctgcttttgaattgctttcgaaacattgatttcgtcctgttccgctaaaacaaaatacaaacagctcttttcaagaatatatctagtctgaattaaatctgattttgttttaccgtcttgtactaaaaaagtagctaataaatcaataaattgatgatcccctacttctttaataaacgtaccttcacctcttctagtttcaatcaacccaattagctctaacgctctgagcgcttctcgaacggaagaacgtcctgcgcctaaccgttcagaaagctctcgttctgacgggattttatcccccgtagttaaacgatcgtcttccattagctggcgaatttgttttagaatttctacatatacttttgaacgttcattcttcaagtttactaccactcactttacattactttaacaggcatgcttgaagcatcatgcctgtcaaagaacagttgatgtaaccttattcaataatcgctaagcgacgtgtgttttcagctacggcttctggctttacctttatccgggcaacgcctgtttccatagctgcttttgcaacagcggcggctactgccggagccactcgtgcatcaaatggacctggaatcacatagtctgtattcaagtcctcttccgtaattaaattagcaatggcctcaactgcagccattttcattttttcattaatatgagtagcacgtacatctagtgcacctcggaatatccccggaaacgctaagacattgttcacttgattaggaaaatcagaacgtccggtgccgattactttcgcgccagcttttttagcttcttctggcataatttcaggcaccggatttgccattgcaaaaatgattgggtctggattcatctttccaatcatctccggtgtgagtgctccttcaaccgaaactccaataaatacgtcagcttcttctaaggcatcagctaacgtaccttctactttgcttcgatttgtataggctgcaacttcatcttttatacggttcatgccgtgaggacgcttgtcataaatcgttcctttggaatcacacataatgatatcgcgcactccatagctgtataataatttaataatagcaatgccagcagctcctgctccattcgctaccactttgatttgtgacatttttcttcctgtcagcttcagggcattaagaaggcccgctaccgtaacaatagccgtcccatgctgatcatcatgaaaaaccgggatatttgtttcctttttcaaccgctcttcaatttcaaaacagttaggagccgcaatatcttctaaattaacgcctccaaaagtaggttctagcaatttaacagtttctataattttgtccacatctgtcgtgtttaaacaaattgggaatgcatctacgccggcaaaacttttaaaaaggacagctttcccttccattactggcagagcagcttcaggacctatattgcccaagcccaatacggcagtgccatcagatacaacagctaccatatttcctttcatcgtatattcatatacattgtttacatcatcatatatttctttgcaaggttctgctacaccaggggaataagcaaggcttaaatcctctgcgtttcgaacaggaattttggactttgattctagtttacctttgttaatgcggtgcatatgcaatgcttcttcacgtaaagacaatgaatttcactcccaataaacaaaatgataacaaatactgcgcctgaaccatgttctttcccacactcatatgatgttataaatccaattgcatttcatttcaagaaaaacgcatctaattcgtatatttcataaaaaacggtggtcagaccacttttttaactattttaccatataacatcacatgaaatctgtaaagactatatcttcttgaacacaacgtgcttctctcctagcattgcttttaaagtttttattaactcgtcgcttcgttcaatagaatagtgaacgggaagcttgaccaattgactttctgcctcataataaattttcacgggaattttccctctatgagactgaaagtgctggtaaatagtatgaagcagcttttctgtaccttgctttgtttctatacgtaagtataattcttctgacggtagtttttgaaccgcctcgctagcagcttcagcacgttgacaaacaatttgctgctgcccatttctttcatctatctttccctgtatcagtaaaaccgtaccttgttcaaacagcagacgattctgctcaaatacgcggggaaacgcaacaacttctccttctccactttcatccgtgatgcgtaaaaaggccatttgctctccttttttcgttcgaatgacgcgaatttccaacacaaatgctaaaagagagaccgcttttcctgaagcgtattctttcatatcgtgaagagaaacaacagaataaaaggaattcagtgcttcatactgagaagcagggtggcttgataaataaaaacctagcatatctttttcatactgaagccgatcttctattttcagttcctctttttccatatatttaggttttaacgaaaattcatctccaaatccaaagtcatcatctgggagtaccaagcttgcatgttcaaacgctacatcaatcgttgctaataaagtagctcgattttctccgaactcatcaaagcctccagatagaatcaaagcttcaagcccctttttattcacggctttttgtgaaacacgggcacaaaaatcaaataagtcttcaaatctttttttctttcgctcttctgttatttcctgcatagctgctgcaccaatatgtttaatcgctgcaaggctataccttatactttcaccttctacgttaaacgaatacatgctcttgttaatagaaggtgggagaacttgtattttttttctttttagttcattaatatattgagcaattttcccttcatttccaataacgctcgttagtaaagctgaaaagaactgcagcgggtaatgtgctttcaaataagctaactgataggctaccatactgtaagcaacagcatgacttcggttgaagccataatcagcaaaacgcacaataaggtcatacactcgattagcaacggataggtcataccctttcttcttgcttccttggataaaatgagctcgttcacgatccagcactgcccgttcttttttactaactgctcttctcaacaaatctgcttctccaagagaaaaaccggccatttttgaagcaatctgcataatttgctcttggtacacgataacgccgtgcgtggattgtaaaatgtctttgagcgtaggatgatcatatattaccttctccactccatgcttgcgcttaatataggttggaatattttccatcggaccaggtctatacagcgcgttaactgctacaatatcttctagctctgtaggttttaattgctgaagcactcttctcattccatctgactctagctgaaaaataccggtcgtatcccctttgctcagcagttcaaaagttttctgatcgttaaatggtatatgagacagtgacagctttcgattcatatcccgctcaattttctttaaaatatgatctaaaatggttaagttgcgcaaacctaaaaagtccattttcaaaagcccaacgtcttgcagagcttccattggatattgagtcagatatacatcgtcatgtccttcctgtacagctacagattgcgtcagcggcttctcactaatcacaacgcctgctgcatgcgtagaagtatgccttggcagtccttctatcttcatggcaatgttgtaccattgttttctggcttcattttcagataaatagtcttgaagaactcttgaatcacgaagagcgcttttcaacgttgtacctggtttagttggaatggctttggacattttgtttagcgcttcttgatcaaatcccatcactctccctacatcacgtacggctgctttagctgctagtgttccaaatgtaatgatttgagctacatgcagccctccatatttttgcgccacatactgaatgacttgatctcgtttgttatcaggaaaatcaatatcaatatcaggcatcgaaatacgttcaggatttaaaaagcgctcaaataaaagctgatgctgaattggatcaacatttgtaattcgcaaggcgtatgagaccagtgagcctgccgctgaacctcggcctggacccgttaaaataccgtgttcatgagcataattcataaaatcccatacgataagaaagtaatcactaaagcgcatattttcaataatgtttagctcataatccaagcgttcctcatattgttccgtgatcacttgaactctttcttgcaatcctttttcgcagagagtgcgcaagtaggttgatgatgtaacagacgggggaacaggatattttggaatggacattacgcctagagaaatttcgagctcgcatcgtcttgcgatttttatactttcttctattaaaaaatgctggtcatgaaagagatcttccatttcatcaggtgatttgaaatagtactcgctgctcttactttttacctcttcatcgctatgtaatttctctccgtctcgaatagctgctaaacactcatacgcatcccgatcttctttttttaaatatttcacttgattcgtcgcaacaagcggaatattttcttcagcggcaagttccgttaactgctgatttataaaagcttcatcctgtccgtggcgctgtatagatatatacaaagactgcgaatatacttttttaaagaattgaagcactcgcttagcatcttgaagtttgttttctgctagcagggtttcaacttctccagttacaccgggtgtaatagcaatcacccctccgctgtaatgatggagccattttttatttacaccgtgtttttccttggtttgaactaaactgcttagttttaatagattttcatatcccttatcattttccgctaacaaaactaaagggtacgctcgctcgctttcttcatgttctaggattgataatgtgagcccaataattggcttgatccccgctttcacgcaggctttataaaaaggaatgactccgtacatcacgttttcatcagtcaaagcaatcgcttcatagttcattttcttagctgtttctacaagttcattaatacgaacggaactgcttaataagctataagaactttgaagctgcaagtgaacaaaaggcacaggacttcccacctttctttaattctttattcttattataaattttgttgccggcgtagacaaattacataactctgagcgtttgtccatatatatgtaggaagcgtgattcattgataaaatagtaaaggaggacacgtcatgacaaaagagccttttatgtctcttttcatttggagttacttcacttcattaggtattattttaggcggttcattaattggagcatttgcggggtttttaattggcaaatctcctttatacgtcatgcataccctcagcaatagtttgaaaatctgggcaattgtcggagcaattggaggaacatttgatacgttttacagctttgagcgaggactctttgaaggggccacaaaagatgtattcaaacaaatccttttaattctatccgctatgggaggagctcagaccggggctcttatcatcaagtggttaactcaggagcattttgtatgagggtacccagcgagcgaatgttcaagcgctccgactggcagcgtttttttgccggcatagtcattggagcaattgttagctggggggtgtttttaacgatttatggcgtttcaagagatagagagctagaagaaattcgaattgctaatgataagctagaaaaagcaaatttgcaaattagcgcatggcaagaagatgtaaaagcattaaacaaggaaatgaagcagcatttaattattcagaatgtgaaagtaaaattagtaaacggcaatcgttataaagtaaactctgtggttgaatacaatattcaaaaaagcgtggacaaagaagcacagcacttaattgcccaagatattgaaagtgcatatcgaagcagggatatcttaaaaaaagcaattgaaaataaaaaatacgaattcgataaaacgatttatgaagttgaagttcatcaaatttatttttatacaacgctttcgattgaagttcgaattaaaaagatggaaaaagtactataataagccgctgatttaaaatcaacggcttattttacagattactcctgactgcagagctcttctaaatcaagtagtaaaggctctacttcttcccatgaataaatggaagcgccggacgcaagaggatggcctcctccgttgtattttctagcaattgtattaatgacaagctcttttgaacgaaggcgaacacgaatttgattttcttcttccacaaaaaacacccacgtttttactccatcaatttgccctaacgaaccgactagctgagaggcatcagctggtgtcacatcatattttcgaagaatttcattcggaattttcatatgagccactcctgctggagacatcgtaaagttttgcagcacatatccgtgtaagtgagcgacgttttcttttgttttgtataactgatcatatacatctttaaaatcgaaaccatattgaatcaattcacttgcatagcaaaacgttttcggctttgtatttggaaataaaaatcgacccgtatctccaacgataccgctgaagatcagctttgctccttcatcattcagagataatcccttttcctttccttccaagtaaaattcataaatcatttcgcttgttgaagaagcagacgtctcaacccaaagcaaatcaccgtaaggagtttggtttggatggtgatcaattttaatgaccattttcccatttacgtagcgctgatctgatactcgtgcttcattagccgtatcacaaacgatgacaagcgcatcctcgtaggtgtcatcagcgatgtcatccatccggtataaaaattttaatgactccgcttcttctcccgttacgtataccttcttctctggaaaagatgtttttaacaattccgctaatccgcactgagatccgtatgcatctggatctggacgaatgtgccggtgaataatgatggtgtcaaactgcttaatagcttctaatatttttgctttcattttctctctcctgtcaatactgttcttgttttatgtacgtaccgcatgcacttacatttccgcagcgctgtatccatattatttattaaatcatatctcttctcttttttgaaagaagaatcaatcaatagtagaattttctgtcatctgcctgtaaaataatagatactactgtaaacactttcaacactacgcattactaacatctagaaacattatggatagaaatacaccggactggaggggcgtctgtgccattttttatgattttaatcgttgtgtcctttgttttctacatgtatttaaaagtaaaatacgtacgttcgaaacgcccaatggaacgaaagtggatttccgctaagtcgagtatttgtcttggctcttttgtattattttttggaatcaatcaatggtttatttacgaaacaagcctttcgcttatcatcggcatactatttgtattattcggttcaggcagcatattagcaggtatcaaagcttacaagtactatcagccttatgcaataaaagaagctggtcaaatgtaaaagaagctgcaaagcagcttctttttttatactctttccaataactgagccatcatcatcgctttccctactacaaccccggcattgtagacttctacatctaatttagcaaacttccgaccaagttctaatagcttagggcgaatttcaattacgctttcaatttgaactggcttaataaaataaacggtgatgttttcaataaccaaatcaccttttttatataagcgaagaacacgattggcggcttccgttacaatagtagtgaaaactccgtatgaaatagtccccatataattcgtcatttgcggcgttacttcacagcgatacaccggtgcttcttttgtctcttgcacgtccataaattgattggttacaatgtcgtcaatagtttctcctacctgcggttgacgctgaatcatttgcagcgcctttaaaacatcttgacggctgataatgccctctagccggtggtaatcatccactacaggcagcacttcaatcccttcccataccatcatatgcgcagaagaagcgaccgatgttttcccgtgaaccgtcatcggatttttcgtcattactttttcaattgaagtagaaaggtcatatccaataacatcttttgaggtgaccataccgtgaactttcatatgctgatccactacaggaaaacgactgtggtgagtcttatcgttacattcatgccatttttcaatcgtatcggttaactgcaagctaaccgcttcagagataggtgttaaaatatcctctacaagcacaatttctttttttatcagctgatcataaatagcacgattaatcatcgttgcaactgtaaacgtatcatagctcgttgaaataataggaagcttaagatcatccgcaagcttcttaacccattcttccgtatcaaagccgcccgtaattaacacggctgctcctgcttcaagagctaattcatgagcgtttactcgattccctacgataagaaggtttccggcctcggtatatctcatcatagcatcaagcttcatcgctccaataacaaacttgtttaacgttttatgcaaaccttcacgtccgcccagcacttgtccatccacgatgtttactacttcagcaaacgtgagcttttcaatgttttctttcttctttcgttcaattcgaatggtcccaactcgttcaatcgttgaaacatatcctttattttccgcgtcttttattgctcggtacgccgtgccttcactgacattcagttctttggcaatttggcgcactgaaattttttcaccaattggaagcgaatcgatatactgtaaaatttgctcatgttttgtcgccacgtgtacttcacccttctaaaacgtttttacgtttcatatgtcttttcttttattatacgggggaagtgaaatggattcaatctaacctctttgacgcaaaggctttctcgcactatttttttgaatacctgccttcttgcggcgcggtgcataaagcagtgatgacaaattgcctccggctacaaaaagagcaaaggtaagccagcttatgctaaaaaccccttgcaaactcgaagttgttaacactaagtgcggcattgcatagtaaagcatcactccgcataataaaagcgataaaataactcgatttttttccatagctctccctccttattattactatcgtatgcagggaagtaaaaaaagcagaacgtttctttacaaataaaaagagattaagacataactgcatcgattcaatctaaagacgaacaaatgtgaggcatgagctgaaccgcttgtgacaccgcagttgatttgcgtgcaagaacttcgctttccgcgggagtcttcgtcttgccctccaatcaacagctagaagccgctacatatatgaaacttacgttcaccttaacaataaaaaaagaacgagtaatcgatattatcgattactcgttcttttttaactttatctgaaatcgttttgtccccgcctttatttatgattaaagatccaatccttctccaacttttaatacttttccttcaataccagataaagactcaacaaattgatgaggatcttgcttaattacaggaaatgtattgtagtgaattggcacaacaagctttgcctgcacccattccgctgcgatagccgcatcttcaggtcccattgtaaagttatctccaattggaagaaatgctacgtcaggctcatggcgaccaattaactttaaatcagaaaataaagccgtatctccagcatgataaattgtctttccttcaatagttaaaagcaaaccagccggcattcctgtataaataattttctcattattttctgtataacttgaaccgtggaaagcttgtgtcaattttaccgtaccaaaatcaaatgtataggctcctcctatgctcattggatgtacgtttaagccttgccagctaagatatgtagctaattctgctactgccacaacaagtgcaccgctgcgcttagcaatttccaccgtgtcgcctacatgatcattatggccatgagtcagtaaaatcacatctacttttacatcttcagcatttaaatctgttaattcatttccagtgataaacgggtcaattaaaattgtttttccttttgtttcaattttaacaacagaatgtccatgataagaaacgtgcatcatatattctctccttttacactaaccttttctatattctacccgtctgttttggttacaaaacaagtgaatacgcggctatcatatcacaaactgcgcaaaaacatgccttattatgcttgctctaataaagttgttgcatcagcgtaagtgagaccgtgtgcatctgcaacagccgcgtaagtgacaaacccatttaaggtgttgatgccttgaagaagggaagggttttttaagcacgcttttttatatccctgatttgctatttgcagagcataaggaaccgttacgttggtcagcgctaaggtcgacgtacgtggaacagctccaggcatattagcaacagcataatgcaagacctcatgcttcgaataagtcgggttatcgtgagtggtaatgcgatcagttgtttcaaaaatccccccttgatcaatagcaatatcaactacaacggacccttttgacatcgtttgaaccatttcctcggtgacaagcttgggcgctttagctcctggtatgagaaccgctcctatcactaaatctgactcttttacagattgtgcaatattgtagtgatttgacattaatgtcgtcacttctttaccaaataaatcatcaagctggcgaaggcgatcagcgtttaaatcaattattgtaacatcagcccctaatccgaccgcaattttagcagcgttggttcctgctactcctcctccaataattgttacttttcctctttgcacgcctggaactccacttaataaaatccctttgccacctttggttttctccaaaaattgagctccaatctgagaagacattcttcctgcaacttcgctcatcggagttaacagaggcaagcttttgtttggaagctgtacagtttcataagcgatgcctatcacctttttatcaatcaatgctttcgttaatgcttcttcagctgccaaatgtaaataggtaaacaaaataagtccttcacgaaaatatccgtattcttctgaaatcggttcttttactttcataaccatttcagcatcccatgcttcttttgcagtatttacgatagaagctcctgcatttgtgtaatcttcatcatggaatccagagccttctcctgcctgtgtttcaatatatacatcatgcccaccgttaactaaagctgtaacaccagctggagtaatagccacgcgattttcattgttttttacttctttcggcactccaattttcacctttatccctcttttcttatatcagtgattaactaaaaaaagaacgccacaccaaatcctttagaaaaccggatttactatgacgttacctttcgatagagctcagcataatcctgcttttcttagtctatatacagtatatgcatctagttattcatatagttcgttatcactctttgcttctggattttccactacagaagccatagcatcgccaatgacgccgcttgaataagaatccattagctgtcttgatgtctctttttctccttcaaaatcatattcatatacatgctgcggatgttttttgtctttcatatgtcacttctcctttttcactttattttctttacgaatgtaaactttacttcataatcccttacttgatcttttctattttcttcttaaatgctctagttataccatttatctcacatcaaaaaacgcccgcagatttttctgcggacgttttgataacttttttatatcgatgttttttcatgcaattcatctttagctagctgaattgctttttttacttgttcaaatcctgttcctcccgcgctattgcggcgattaacagctgtttttggacttaatacatgatagatgtcttcctcgaataaatctgacgcttccttatattgttcaagcggcaaatccattaggtagatatttttctgaatacaaacgagaaccagtttcccaaccacttcatgtgcttcacgaaacggcataccttttgaagcaagatagtcagctaactccgttgcatttgaaaaatcttgtttcgtagctttttccataacatttgtttttactgtcattgtttcgatcatgccagcaaaaatggtcaaacatccttcaatcgttgtaaccgtatcgaacatgccttctttatcttcttgcaagtctttgttgtatgttaaaggcgtgccttttaacacagtcaataggctaaataaatgaccatatactcgtcctgttttaccacgaattaactccgccatatcaggatttttcttttgaggcataatactgctgcccgttgcgtacgtatcatccatttcaataaattgaaattcttgactagaccataaaattaactcttcacaaaaacgagataaatgcatcattaaaatagaactgttgcttaaaaactctaaaataaagtcacgatcgctgacagcatccatactgttttgataaatcccattaaagcctagaagctcagcgctatagtgacgatcaattgggaatgttgtaccagctaaagctcctgctcccaaaggagataaatcaatacgcttcagcgattctgcataacgttcagcatcgcgcttgaacattgaaacataagccattaaatgatgagcaaaagaaaccggctgcgcgcgctgcaaatgtgtgtagcctggaaaaatggtttcaacatgctgatctgcttttgtaagcaatacatcttctagattttcaatcagacctacaatttgctgaacatgcttttttaaatataagtgcatatctgtagcaacttgatcattacggcttcgacccgtatgaagcttccctccaaccggaccaatttcatcaattaataacttttctaaattcaaatgaatatcttcatattgagcagaaaatgttaattctttcttcttagctttttcaagcagtgtttgaaggccttttttaatttgtgacgcttcatctccagaaagaatactgcatttctcaagcattgttacatgtgctaaactgccttcaatatcttcttctacaagatgctgatcaaatgaaatcgacgcaccgaactcgtcaatccattgttcagggcgtttcgtaaaacgccctccccaaagtttggtcataccgttgtcaccttcttttgatttaccatgctgctcacttgtgttggaagtccccataatgagatgaaaccaactgctgcattgtgatcaaattcatcttcttttgtatatgttgcaagtttttcattgtataaagaattaggagatttacgtccctctacgatagcatgccctttaaatagttttactctcactgttccgttcacatattgctgtgtatcttttaagaatgcaagcagtgaatttgttaatggagagaaccataaaccttcatagataacttctgttaattttttttcaatcactggtttaaagtgcgctacttctttcactaatgttaaatcttcaagctctttgtgtgctttaattaatgtcatagcagctggacactcatacacttcacgtgatttaattcccacaagacggttttctacatgatcaatacgtccgactccgtgcttacctgcaatttcattcaattctagaattaactgagctagcgtgtaagattgaccatttaatgatactggaacaccttcaacgaattcaatttctactacatccgctgtgtccggagtgttttcaagagaagccgttaggtcatatgcttcttcaggtggagctgcccaaggatcttcaagaacgccacactcgttacttcttccccacaagttttggtcaattgaaaatgggctgtctaagttaattggaattggaatattcttttcttttgcatactcgatttcttcttcacgagaccatttccaatcacgaacaggagctaaaacttctaagtgtggatttaatgctttaattgatacttcgaaacgcacttggtcatttccttttcccgtacatccatgtgcgacagctactgcattttcttgctctgctacttctacaagctttttagcgattagcggtctagatagtgcagatactaatggatattttccttcatataatgtgtgtgcttgaagtgctgctaacgcaaatgtattggcatattcttcttttgcatcaatcacatatgatgatactgctccaactgttaatgctttttctttaacgaattttaaatcttttccttcgcctacatctaaacagcaagctaccacatcgtaccctttttcctgtaaccatttaattgcaactgatgtatctaaacctccggaatatgctaaaacaacttttggattactcattatctattcctcctacaaattatatatatattaatacaaccgttttaatttttattcatttaatctactattactttaacaactttttaatctattttcaatagttattcaaaaaaaagtatataaattcacatttattttaatttaatagggtaaaatctcttaaaatactgtaaaaatagacatgaatgaatatgcctttcttacatactgtgtatatttatatgcataaatcaagtataaatgattcatttttcacttacagtagctttggcttttgtcattgtataaaatggaagggaagaggtgaaaaaatggagcacttttttacttatgacaacagactcggtataaaaattcctgctctcgaaagagaatggacattctattctgaaaaagttcagcaggatatcctcctaacatgggaatccattcgggggcagattccagacaaaattcaatctttagaaaagagtattaatcaaaaacaagcggcgttagaagatgagactaattttatccgctcctgtgaattaaatagcgagataggagaacttgcttctattattaatgatttgtggatttggtatcgaacaaatgaggaaatatcaaaagaagttcacggatagacaaaaaaacgagtctcatgaaaaattaatgagactcgtttttcttatccagcaaatagcggtattggtaaaagcgcttcgcataatctgtcacttgtttggccattcgataattcatccctccgccaaccatcatactcacaattggcaaacgattataaacttttcgcttcgcagcaaatatagctagcgttttcccaatttgtacaacgattttttgcagccacgttttatctacaatttgatcaacaccttcataaaaatacgggtcaaattcttggcttaactcaccctttaattgatgccacccctcagcctgaaggtgtctaggtaacgttgctgcatggaacacttttagcgttagcataagctctgaaggagtctggatatgatagccgtagctcattgctgcctgttgcaccgcttgaatattcatgcataaaacagcaggtatatcaataccgactagcagcgattgtcccgttcctgaaagtgctccttgactcagcgcatacaaccgaagcttggccatttgctgttcgcatatataagaaagctgatctacttgaagggaattcatttctgacagctctgtgatatcctctttgaatacacgagcggtttcaataattcgttttgtcgcttgagtttgcatttccgtaccttgaattaatgcggttaactgaaagagtccttcatcaattttatgtaaataggtctcacgaacagaagctggaattaagttaagccctttttctaaccactcttcgtacaataactccatctcagttgcttctacactctgtaagctctcttcccatttatagatttcttctaaaagctgttcttcgcgattcgttagtatcatcatgtcaccctttcaagaaataagtagttttatttttattataacaaataatgcatccgttacattttgcttcctatattatttctttcttctatacgttgtaaaccttctttcaatcgtcagctacttacgctatataaaaaagctgatttcctaacaaggaaatcagcttttcgttagttcgcctgacaatttatgagaattcatgcattgaagaggcactttatgaacttaaatattcgctaaacgagtaacgtcacgtgcaatcataacttcttcgtctgtaggaataaccataactttaactggagaatgagggtagctaataaatgcttcttctccttgtacactatttaaagctggatcccaataaacgcccatgaactctaaaccgcgaagaacgcgagcacgtacaacatcactgttttctccaatacctgctgtgaagatgattgcatctacaccagacatacgagcagcataagaaccgatatatttatgaatacggctagcaaatacttcaagtgctgtttcagcgcgttcattgccttcagcgcttgctttgattagatcgcgtaggtcactagaaataccagatacacctaaaagaccactttctttatttaatacatttaatacttcgtcagcagtttttcctgttttctccataataaatggaattaatgcagggtcaatgttacctgaacgagttcccattgctacaccagctaatggcgtgaagcccattgatgtatcaattgacttgccgccttcaattgcagcgatacttgcaccgttacctaagtgacaagaaattaagcgcaattgttcgatcggacggccaagaagctcagctgcacgctcagaaacatatttatgagatgtgccgtggaaaccgtatttacgaacgccatacttttcatagtactcgtacggtaagctgtacaagaatgatttttctggcattgtttgatggaatgctgtatcgaaaactgctacagctggaacatttggaagaatatcttggaacgctttaattcccacaatgtttgctgggttgtgaagcggtgctaaatcagataaagcttcaatttccgctagtgtttcatctgtgattaaaacagaatcagcaaatttctctccgccgtgtactacacggtgacctacaccagtgatttcatcgtatgattgaatgatgttttgagaaagtaacttttcaactaaaattttaactgcaacagcatggtcagggatttctgtaatatccgtttgtttttcaccatttaccgagatcgtgaaaacagcgttatctaaaccaattcgttctactaaaccttttgttaataccgtctcacttggcatttcaaataattgaaacttaagtgaagaactgccggcgttgattgccatgatttttgacataaaaaaacagctccttctttattatacgtgcatcataaacataacgaacagaacataaaagtgtaatctctacaatattctatgcatttcgacacgatttctatccttattcatttaatcattcacgacaatagatttcaagagctatacaccatgaaaacgctaccggaaaatattcattattttcgaaaaagacttactttttattcactcggaaccattggtccatttgagccataatatcactcattgcttcccgattactgaacttcggcaaattcacaagcagcgcgttctcaggtgctgttactccttctccctgcttttgaagaaccataatacttttagcagcctgctcttgtttgaacattgaaagtggcagctgaataatcccttgcacgattgcttcctcttttagcaacggctgtaataaatgagactgttcagattcaaacaagttatttggaataagggctactacgtatcctccatcttttacatgacgcaagctttgttcaataaataagtgatgagcataggtgtgaccttcttcagctcttaccttatactcttttaccccttcgtcgtttggataataaccaaccggaaggtcacagacaactaaatcaacaggatcaataaaaagcggctgtaagctgtcttgattgaataattgaacgccgtgcttctgtaaatttgcatttacatatgttaattgaagtaataaatcatccacgtctacaccgtatacgtgttcaattgacgcagcgtgtgtgtttaaaatggttgttaataagttccctgctcctactgcgggatctaaaagcgtatatttatcttttcctgccatgaactttccaactagatagctgacaaatagtcctacagcatcaggcgtcatttggtggttaggctgaactgcttctttcatgccttttaaaatagctagctgatacgcttttcgaatcgtttctttttcaaaatgatcaagcgtgattgaatcgtattctttttttaaacgttttttagttacctcatctagctcttcttgtaaaatagttccttgaaacaaattttctcccgtttcagctactgcttctaaatatacgcagtttagttcttttcttaaaataatagctgtttgatcaattacaccaaatagcttttccatactagctaactgactcatattctgcctcctgtgtaatgaaataatatctatataaatgagtaaacgtcctatttggaacatcatattttatcataaaaacttcttaaaacacaaagaaggcgaaaaacattgttttccgccttctgccgaacgccactgacaatcttacttagctgttttagctgcttcgattgccgcttcgtagttcggatgctcagttacttctggtaagtactcaacatacgttacgttgtcatttgagtctactacaaagattgaacgagctaataagcgtaattcttgaatagctacaccatatgcttctccgaaagataagtcgcggtggtcagataaagtttgaacattatcaatgccattagcaccgcaccagcgcttttgagcaaaaggtaaatctacgcttactgttaatacttttacgttatctaatttagctgcttcttcgttgaagcggcgagtttgcgcatcacaaactccagtatcaatagaaggaactacactgattaggcgaacagaaccctttgtgctgtcaagcgttacttctgataaatcatttgctaaaaccgtaaagtttggcgccttgtctccaaccttcacttgatttcctaataatgttacatcgttacctttaaatttagtcacgaataattcctcctttaaataagtatgtacactgttcatattagcttgtctgtctctatattgcaattaaatgacatacaaaacatggagctgtatcctaaaaaataagcgcaataaaaaaagactttgcctgcttcttttacgatttaaagaagcaggcaaagctttatattatttctacaaattaaaatcatttgaactgtcatgatgctgattttgttgattgtgctgatcctgctgatgattgttccgcttgaacatttgctgcacgcgttcaattgcttgaggtgctgtatctagaatcttttcatataaatgtgtactttcgttaaggtgaagcattttaattccgcttccactcacaattaaaaaggcgatgggcgtaattgatacaccgccaccgcttcctccgccaaacggatgacttgattcttgctgatgctgtcctggagaagatggtgcatgtccttctactccaaactcgcttccgcccgctgcaaaaccaaaccctacttttgagacagttaaaataacactgccatcaggtgtttctacaggatcaccaatgattgtattaacatcaatcatttcctttaaattttccatagctgtcgacattaaacttttaattggatgttctgccattaagataacctccttatgttttcacagagtgtgtcttgttcttatttgacgacttccatcttttgcgacgctttttggacgtatgccgccagtatctcaaggtccgtaaacctactagaatagcttgaccaactcgaaaagaaattatgcactcaaataccgtttctgaccaaagatgttgaaatacaggagtaacgctcatgacaggcatatcttttaatttcatataacggctgattataacaactatgcccccctttgcagaccacacagccccggtaaggatgcctgttaacgcagcgtcacctaagccgaaacggctgtgccatctaatatcacttaccgtcactttctgtaagaaacgacgaaaaattttatgaaaaccgactacctgttcaaggaattgcttcgcattttctaacatgcttagcccgtcttctacagaataatcactccatgaattctcgtcttcttttccttgatcacccattcctttcttcttttccacaagcaaacgaggagaatcttttttcactttcactaccggaatttcatatgtatagcgaataagaccaaaccaagccctgagtctcactctataataatcgttatctcggacatggtgaagatctacaaacagcgtgatttttgtccatataataagtataataacaattaaaagtgctagcaatatccataaaagccatagcacatccttcactccttcttagcttcacattatctccaaaacacagaatattaaaccttatggaaacaataaaaagaagttgagatataacgaaatgaatccaatctcaggacgaacaaatgggatacatgagctgaaccgcttgtgacacagcagttgatttccgtgcaaaacttcgctttccgcggacgggcgctgagcctcctcgtcgcatacactcctgtggggcctcacctgctccgcttttcctgcaggagtcttcgccttgccctccactcagcagctagaagaatctaaactaataaaacctgcgtttaccataaaaaaaacgaaccactaatcaaaagtcttgatcaatggttcgtttttcacttcgtctaaaatccttttattctagcctcttttgattatctgctgattgtaccttcatgtatgacagttgtatctgcgtagtaatcgtgtgctccttgcttcttaggtaaaaacgcaactaataaatagccaagtaaaaaaactgttttagaaatatagcgtccaactccttcacgaaacagcacaacaggccaagttaaagtggagtctttcagcgatactactttaagcccaaacaccatctttccaagcgtttgtccaaaatacttggtcattaaaacaaaataaccataaaagataataaccgttacaatcgtatagggagaaaaaaatccatctcctcgagaaatacctgctaaatggaaaataggcttgatcagcagagagttcaagctagctaccacagctagatctaaaagatatgcccaaaagcgcatccaaaagcctgcataatggaagtcactacctattggcgtacttaccgctggctcatgttttatattgtcgtttgattcggttgaatgagactgattttccatgttcccacctctattctgcatataaatacatcagacgcggagagcttggctgcgcaaatgtttttaacattgcagtaacttgttcatctccacctattactttttgcatgctcattgaaagccaagaaggcagtccgaatccttgattgtattgaattacttgtgcaccttttaacttataatctttctccattcctgttaccgcatcttcaaaatagcctagttgatcgaccagcttcagctctttagcctgacgtccatcgtacactcgtccatctgcgagagaacgcactttttctttagacaagtgacgtccctcagagataacattgacaaaaccatcgtacgagttgtctacaagtgtttgcataatttctttttcttctccggtcatttctcttgttggagacataatatctttatgagctccgcttttaatcacgacagattctactcctagtttatcagccagcttgccgtagttaacgctttgcataattacacctagtgaacctgttaaagtgtccgggattgcatagattttgttagccgctgttgaaatgtaatagcctcctgaagcagccattgatcccattgaaatatacactggctttttcgtttctttcttcagctcttcaatttttttatgtatttcagcactttcaacgacgccgccgcccggtgaattcaccttaataatgactcctttaactgtcttatcattttttgcagcctctagctgctttaaaaatgcttggtggttataaccattttgggacataagcggagaggaaccgcttcctgtatcttgaatcgttccattgacctctagcactgcaattttcttagctgcattccctttttcaataactgtttctgatagttcgctgtcgtctcctccaaagatgcctgccagaccgtcatctttttcttctttgactgaaaaaccaatattaacaatcgcagaaaaaatgaataagcaggccgcaattaaaagagcaatccacctttttttactcatgaaaatcctcctttttaggtgtcagaattaaaagattattcttttaattcttaaagcaataatgctataattattgtaacaaactttttttaaaaagtttactttatcgctaatattttacatatcagacaaacaagggggaactatctatgccaaatcgtcgcaacgtttatttctttcatccaaaaaaccaggaaacaaaggcgctcgtaagtccacttattgaacttgcaaaacaatatgactttcaagtagtagatcatttcgacagcgctaacatcattgtaagtattggcggtgacggagctttcttacaggctgtccgtcaatctggctttcgagatgactgcttatatgctggtgtcacaacttcagatcaactaagcttttactgcgattttcatatcgatgaaacggataaaatgattgaagctattacgacagaaaatatagaagtacgtcgatttcccgttttacaaactcaaattgatcaaggaacttctttttattgcttaaatgaatgttcgattcgatcaggagttataaaaacactcagtctagatgtttttattaatgaaaatcactttgaaacattccgtggggatgggatgattatttcaacaccaacaggcagtacggcttataataaatcggtaagtggagccgtagttgatccgttaattccttgtatgcaagtcagcgaattggcatcgttaaataataataactatcgtacattaggatcttcattcattctaagcgctgagcatacgctcactttaaaactatccaatgacaacaatcacagtccaattattggaatagataacgaagcattaaatgcacgtcaagttgatcaagttcaaattcgtttaagcgaccgtcaaattaaaacggttaagctgaaagataactctttctggcaaagagttaagcgtacgtttctataataaaaagcgcccttgggcgctttttatttttgatatacaatttctccattaatagcagtcatctgcacctgtacccctggaatatcatctgcaggtatctcaaacagatctctttctaatacggtaaaatcagctacatagtctttttgaatatatccttttttatgctcttgatgaatggcctgcgcgcttcctaatgtaaacagctgaacagcttcaaatacagtgagtcgctcagaaggtatgtaaacgaccgagctgttcggagaagtttttctagaaactgctgcatgaatcgttaacatgggattgataggttcaataggcgcatccgatccgcctgcacacataacgccctcgtccaataacgttttccacgcatagcaatagtccaaatgctcttctccaattttttcaataacccatggaaaatcactggctaaaaaccgaggctggatatccagcacaaccgggagcttttttacacgatcaactaaatcttttcgtaggatttgcgcatgaataatacgatctctttgccctgtttgaggaggatattgttcgatgctttctactacatattgaaacgctaaatcaccaatcgcatgaattgcaacggtcatattcaattccctcgcttttctcactagctgttttaattcatcgagtgattgaatagctacacctcttgtagaagggtcgcttttgtatggaaagcttaaaagagcagattgactgccgagcgaaccatcagcaaaaatcttcattggccctatttcaataaaagcggatgtgtctttcttttcttcaacgtatgtatacatatcatctacagcttcatgatgaacaagtaaatgagcacgaaacagctgcttttctttatgaataacgtcttgaaatgcttgatatgtacgcaaaaagcctccataataatttaaatcttccgtatgtccacccgtcaatccgtactgaacacaatctttaatagctactgaaagagcttgtcgaatgtatgcttccgttacttgaggaatatgagccgttactaattcttgcgcttgatcagccaaaaaaccagtaggatttcccgcttcatccctctggataatacctccttccgggtcgcgtgtttcagctgtaatcccggcttttttaagagcagtcccgtttactactaatccgtgacgacagactcgcttcaacataataggatgttctgttgaaagttgatcaagatcttgatagtgaatcaaagaggaatcttcccactgattttcatcccaaccttctccaattacccattctccttttggtgtactctctactttttgccgaacgcgcatcagcacgtcttccttagaagtagcttgagacaaatcaagcctaatgagcttttcaccatgaccaattaagtgaagatggctatctacaaagcccggatacattggatatcccttgaggtgtacttcattgtcaatctcagcaccccatttgattcttagatcttcttctgcgcctatatcttcaatgaatcctttttcaatatatacgctttctacatgctcatcttcttttagcatcgtatatattttgcctccgtaaaataaagtccccatcgccaacatctcctttactttataaagcttgatcttgtctctattatacgtgacaaaacaaacaagacaaaagagtgaggtttcccccactctttttagccatcattatttagttaatatgacttatttaccaccaagttgttgctcagccatttgaactaagcgtttagtgatttctccaccaacagatccgttagcgcgagctgttgcttctggtccaagatttacaccgaattcagaagcgatttcgtatttcatttggtcgatagcagctgctgaaccaggagctactaatttgtttgtgtttgccatgtgttttcacctccttgttgaatatagattgtgtcaaaacacatggcatcatacattatttttttggtaattttatgaaatttaacttttaaaataaatcttctacgctgtctgcggtatttgtagccgaagaagctgtcatctcaagcgtttctacattatttaccgcttcttgaattaatgtttcaaaatcataaaattgttcgtatcgatttattttttcacgctttggcttcgtttttggtgagcttggcgtaaaaattgtacagcagtcttcatacggtcgattcgaaatttcatgtgtatcaattttgcgggcaatttcaacaatctccgttttatccattgttacaagcggacgcaaaattggcgtattagtcacttcattaatcgcatacatgctctcaaccgtttgactagctacttgccctaagctgtcgccagttacgatagctaacgattcatttttttcacgaataaggtccgtgattcgaagcatcatacggcgtgtagaggtcatggtataattctctggaatttgcttttgaatcgcttgctgtacagctgtaaacggtacaatgtgaagctttactttttcgtgataagccgttaatttttgcgttaaatcgatgaccttttgcttagaacgttcacttgtaaaaggcggactgtaaaaatgaaccgcttctatttctaaaccacgcttcatggctaagtatcctgcaaccgggctgtcaattcctccagaaagcatcagcatcgcttttccactcgtaccaactggaagacctcctgctccgcgataatcaaaacatgtaatatacgttgcttcacttctcacttctactcgtacatttacgcttggttcttttacgtttacctttagatgctctgtatttcgtagaatatgacttcctactgcataatttaattcgtttgtatcaagaggaaattgtttatacgctctccgagtagatactttgaatgtttttccttctatatcaaattctttcattgcttctaacgctgcttcttgaatcgcttcaagctcattttcaacttttaatgctaaactaaagctttgaataccaaagatttgctgaagacgttcgatgataggctcgtgattttcaccgtttaagtgaatatacatgcggtctcttgtgtattttacgtgaatattttggaatgcactaagagccgttacgatattttttcttagctgggcaacaaatttttttctattttgtcctttggttgagatttctccgtaccgaattaaaatatggttatatatcataatcatttacctcattactttctttagatcttcaattactgtgaaaatagcatttacaatgggcgttacttcattataatcatttaagcctgacaagcttaatcgaatggattgatcggcttcttcgtaatttttaccgatagctaaaagcgttttgcttggcttttttcgctttgatgagcaagcagatgtagtggatacaaacactcctttttcttcaagagcgtgaacaaaaacctcacctttaataccttgtgctgtaaaatttataatatgaggtgccgaatgctcattcggcgtattaaccgtgattctttcgtgagcagaaagtttgtccatcagttctgcttttatttcccgcattttttgctgattttgagcagcatgttcaagtgttaaacgaagtgctttagcaaatgctacgattcccggcacattttccgtgcctgatcgattctgcatttcctgagagcctccgctaagcagcggatgaagctgaactccatttcgtttatataaaattcccgtcccttttaagccgtgaattttgtgccctgataatgtgcataaatcaattttatgatccgctaaagaaagcggaacttttccaatcccctgcacatgatcgacgtgaaaaagcaccttggaatagttcgtcagcatctgtccaatttcttcaattggctgaatggtgccaatctcattatttacatgcataacagatactaaaatggtttcatccgtaatagctgattcaatagccgcaggtgatacaaaaccactggaatctaccggaacatacgtaacgttaaatcctaggacttctaactgcttgaatggttcatgaacagaatcatgttcaatatttgtcgtaataatatgctgacctcggcttttatattgcatcgctacgcctttaatagccaaattatttccttccgttcctccagatgtaaagataatttcatttgacgatacgtgcagcaattctgctacttgctcacgcgaacggctcaacaaattctccgcctgtacgccaaactgatggagggaggatggattgccataataagttgtagctactttgataaaagattgtatgacttcgttatagggttttgttgtagcgctattatctaaataaatcaaggatgcgcgcccccttcttcattttttcggaacaacgtattatcataacataccttaatacttttttaaattaggttttgccttagtaatcataacaaggatagacgatcttttcaaagctatttgccactttataagcaaggtctccccttgcttatcctaacagttgctgccgtatttatagactataccattagcattgaaagagatacgagatagtatgcaaagaaaagcatcataaaaaagctcgtgtccaaaggacacgagctttttaactctgtgaagatacaatacgctgtatacgatccagcgcaccgggatctacttgctcaatagctgcagatgcctgttttaatgcttctttgtattcataatgacgaaatgcttcttctgcttcttctaaagactgtgcaattgagtgatgagtacttctatagcggttaccgtattgaatcactctttcaacgagtcgcgcttcttctaacattgcctctgtttcatcaaatgtatcctgaacaaaaccaacagcatcttcaagtaaagattgaacagcttgaatattaagcggtttttctttcagcttagcggttacttcatttaagatatgaaccgttttttcaagctgcactttatattcttcaggaacaccaggaaggttgcttttttgaataaggcgtcgtgcttcaatcaactgagatttcagttcttctattttgtccttagctgagagctcatctttgcgaagagcttgtagcatatcgctataggattcctgagattcttttaattggttaagctgtttggaaacgtcttcgagttcttcttggatcacactgtaggctaaattgtgctccgccaccttgtccgaaatattatagtacaagttagtcaatcgttttagttcgcggtccattttataatatacgtctaaatcgcgctctttaaaatgatagctttgctgtacaaatagcgtttcttcacgaagttcacggtttcgttcttgaagcatacgaaggaagttagataccgtatgagattcacggttcattttatgataggagaaaacctcatgctcaagtgagtcatataactgctctaagcgttcgttcacatcatctagttttgtaatcgcttcttccacatataattcttcaatatctgcaataatttcagcagtttcttgttttaaaagctctaccgtttcttctacttgcagatgatctaacacatatccctgctcactcatttcgtggaacccgtcaagcagttcattgaactgaacaggaagagtggtctgacactcaactaacacttttggaatttgttctaaatacgaatcaatagctgttaaatcagtttttaattgaagaacaatctcacgtgcttgaagatagtttccgttaatcgtctcttcctcgtattttttaaactgctctttagacgtattaattgcgtattctaacgttttttcagcatttccataggaataccgatgtgcgagcaattttttcttcacatggcggtgaagctgatttaattcctcaatatcatatcgattatcttgttcgctaccaattaaattttgaagttcagtaagtatgttttcaatatctatcttggtttgttctaaggcttgatcaatatgtatagataactgcttcgcttttttaaatcggtatttatccgctgcttcttccgtttcaaacagttctttatcaattttagggagattagttgatataatttcatcccactgctcacgccaacgttcaaatagctcttcagtttgacctgtcatgttcaattcttttacttttgaaatttcctctgcaactggcgtatttgctaattcgactttgatcgtttccaggcgatcaatttcttgataaatctttttacgtgaaaacattccgtacacaactaatccgataataagtatgattagtgctataatgaattccatactaagcccccttacagtgcgttctacatgacaagtttcttatttataaaaagggtcaatttaatcctttaaatttttttgcgtcaatgtttttatgataccatgtaaagtccaacttttgagcaaaaaattaaatttttttatacaaaatattggcatggagtcactttgtgtcgttacaatggaaaaagaagaaaaaaggaggcattttttatgaaagttgacaaacatattcatactccattttgcccacacggctcacctgattcattgcaacaatatgttgaacaggcgatttccctgaacttttgcgagatttcgtttacagagcatgctccattaccaaaaagcttcagtgatccgacgcctgatcgcgacagcggaatggatcctgacaaacttgatcgctacattcaaaacgtacagcaagttaaaaaagaatttgagcccgatattcgtattaatatcggattggaagttgactttattgaaggatttgaacacgaaacaacagatttcttaaacgaatatggtccttatctcgatgacagcatactttctgtccacttcttaaaacatgaagaaggatatgattgcctagattttagcgctgacgtatttgcacatattgtacagaagtttggcagcgtaagcaaagtatatgataagtattacaacaccgtattacgctctgtacaggccaatttaggcgtttataagcctaagcgcattggtcatatgacgctcgtacataaatttcaaactcgctttccatatgaagacacactttcacctattattttagcaatactcgatgaaataaaaatgaaagatctggctttggattataatggtgcagggttgtttaagcctttgtgcaaggaagcgtatccagctccctttgtcgtaaaagcagcccaacagaaaaaaatccctctcgtatatgggtcagatgcccactgtgcgaaggatttaggccaaggctatggagagctccatttaggataattgaacgcgcagtttgtttgtccgttcatatggcaaacataccgtagtgtggacccattgctcaagctcaatcgcatattgctgaacaaaatacggttcgtgaggcaatatatgaagaacttcacttaggtactgaggatgaagataaggcatagacagcatgcccttaagctcaatgattgtaaaggaaacgtgcagctttcgaaattccttttctttcatccctctttcaaggattgtttttaagtagtacttttccttggttaaatacgtagtcataacttctcgaattaaaatcgtgtcaagagagatttctctatatacgagccgggcaatatgcctattttcgtgctggtaatgtaagatagctcgaatcatcacgatcatactttctgttgaagacagctttttcatttcttggaatgcttgctccagtaccgcaatataaccttcaaaataagaaatcactaaactttcaagcaatccttctttgctatgaaaataatatgaaatattcgctacgttcactttcgcttttcctgcaatctcgcgcaccgacgtaccatcaaaaccttttacgttaaaaagagaaacagccgcatcaataattttctctttcgtttttgactgtacagccatctatctacacctcatttcgatttatttttacaaaacacatatgattgcaaaattgtgtagaaatcgttacagtatttaaaaaggattttagtagcctctctacataattcgtgataggctttttagttcctgtaatcttttatcgacaaagtagcgttaaaactgacgtttcctgataaaaactcattaaatcttatgttgaatggaggagaatacattgtttaatgtcgaaaactacagcggctcaaaacaaaaggattatgaattagtaattaagcaattacgcgccttattagaaggagaaagtaatacaattgctaatctagcaaatgcttcagcgttactaaatcaatttttaaatgaagtaaactgggtaggcttttatttaatggaagacggcgagttagtactcggccctttccaggggctgccggcttgtgttcgcattccacttggaaaaggcgtatgcggtacagcagctcaaaatcaaagaacagagcgaattgaagatgttcatgcattccctggccacattgcatgtgatgccgcttctcaatctgaaattgttgtaccaatggtaaaagacggtaaacttttaggtgttcttgatattgacagtccaatcaaaaatcgctttgatgaaatcgatcaacagtatcttgaagaattcgtcaaagaactcacttcttttctttgaatatgaataagcaaaaaaaccgctgtaaatcagcggtttttgcttattaaacaaacgtttgattagcccatcaccaccgttttcttatgttctttcttctcctttcatacttcaaaagaatatatcctttcttttacattcttttaatcttcaatcttccttgactttatacgaggaaacacctataatactcgttgtgtgaaatattgcagcttatacaatcttctttatgttttttcattttgttcctcattaaaaggttgttttacagaagtagcaattcttttaacaagatggtgtatcgtgtaactctctgctgctagagcgatggtacatgaaaacaaaatgagcatatcgctagaatgtgtctgtttttgttttgcataaaataaaaacacaaacaaggaggagtcatcatggctcgttatacaggtccaagttggaaaatctctcgtcgcttaggtctttctctaagtggtacaggtaaagaattagaaaaacgcccttacgctccaggtccacacggcccaggtcaacgtaagaaaatttctgagtacggtttacaattacaagaaaagcaaaaattacgccacatgtatggtgtaactgagcgtcaattccgtaacttattcgttgctgctggtaaattaactggtaagcacggtgagaacttcatgattcttttagaagctcgtcttgataacttagtataccgtatgggtcttgcacgcactcgtcgtcaagctcgtcaattagttaaccacggtcacgttttagttgacggtaaacgcgttgacatcccatcttaccgtgtacaacctggtcaagtgatcggtgttcgcgaaaaatctcgcaacctttcaatcgtgaaagaagcgcttgaagttaacaacttcgtaccagactacttaacagtagacgctgagaaattagaaggtacattcactcgtttaccagagcgttctgaattatctgctgaaatcaacgaagcactaatcgtagagttctactctcgttaatagtaaaaagccgttccttatggagcggcttttttgctatctatataaaaaaaaggcctttcggcctttttttatgcgtattgaataagcgtatattttttcttgcctcgacgaatcactgtgaattgaccttcaatacggtcttctgcacctactgttttttgtaaatcttgttcacgctcaccatttaagtaaatcgcaccgtttgaaatatcttcacgtgcttgacgtttagaaggagaaattttactttctacaagtaaatcaattaaaccaatatcttcacctgtatgcgtgtaagaaggaacatccttgaatccttgcttaatttcttctgctgttaattctgaaatacttccgctaaataaagcttgcgaaatacgaattgcttgctcaagagcttcttcaccgtgtacaagcgtagtcatcgctgccgctagtgctttttgtgcttcgcgtttttcaggagcttcttttgcagaagctgctaattcattaatttcctcgtgtgataagaatgtaaagtattttaaatattttataacatcacgatcatctgtattaatccagaattggtagaattcatacggacttgttttttcaggatctaaccaaattgctccgccttctgttttaccgaacttcgtcccgtccgcttttgttacaagcggaactgttaatccaaatgcttttgcatcttcttctgatttacgaattaattctaagccagctgtaatatttccccattggtcgctgccgccaatttgaagcttacagttatatgtttggtataaattcaagaaatcgtatgattgtaaaatcatgtagctaaattccgtaaatgaaatgcctgattcgatacgagattgaacagaatcctttgccatcatatagttaataccaaagtttttaccgatatctcgtaggaatgtaataacatctaatgagccaatccagtcatagttatttgcaataactgctgcattttcaccttcttcgaaatctaagaagcgtgaaagctgacctttaatacgctcactaaacatggcaaccgtttctttttcatttaatgtacgctctgcttttttaccgcttggatctccaataagccccgtacctccaccaactaatgcaattggttggtggccagcttgttgaaagcgacgcaaaattaaaacaggaagcatgtggccgatgtgaaggctgtcggctgtcggatcgaatccacagtacaaacgaacagactctttactcaaaagttcacttaaacctttttcatccgtttgttggttaatgagccctcgaaactcaagatcttgtaaaatatccatgttatatattctctcctttatctaattgctcgttacaatttgttgaacaacataaaaaacgccccttcttaaaaaagaagggacgaaaatatcgcggtaccaccctatttggaaataaattatttcccacttaaatgatgtaacggtctacccgtcttttgctactgtaagttcacaaaagatgctcaaggacgtatttcatatttgtctatgtactgattttcagcaaccatcagctctcttaaacagggagacaagtattacttcttcctatcactgcagtttattttatttaaaagtttacaccccacaattatgaatgattttattttaaaattcaagtccaaaaaaaagttcaaacagctggctgtttgaactttataaaaatcacttattttccctacaaagattgaaacatttactccttagtcttccatcgttgacaaatcgcccgttggcaaatctaattcccacgcttttaaaacgcgacgcataattttaccacttcgtgttttaggtagcttatctttaaactcgatttcacgcggggctgcatgagcagctaacccttttttcacaaattgacgaatatcttcaatcagttcatctgaagattcatacccatctctaagtgcgataaatgctttaataatttccccgcgcacagggtcaggcttaccaataacacccgcttctgctacagcaggatgttcaacaagcttactttctacttcaaatggacccacgcgttctcctgccgtcataataacatcatcgattcggccttggaaccaaaaataaccttcttcatccatatacgccgaatcacctgatacgtaccaatcacctggcataaaatatgactcatacttttctttgttgttccaaatcgtatgcatcatagatggccagccttttttaattgctaagttccccattcgataaggtggaagctcttgcccttgatcgtcaacgattgctgcttgtacgcctggaattggtttccccatagatcctggcttaattttcatggacggataattacaaatcgtctgaccgccagtttcagtcatccaccacgtatcatgaatacgtttttggaacaccttcattccccagcgtaccacttcaggatttaacggttctcccacacttaatacatgtctgagattgcttaaatcatagcgtttaactaagtcatcaccagcacccattagcatacgaaaagctgtaggtgcactgtaccaaaccgttacgccaaaatcttcaagtgcttgataccatgcatctggactaaagcgtcctcctacaatcacattggttgctccagcaagccaaggaccaaaaattccataggaagtccccgttacccaaccgggatctgctgtacaccaatacacatcgtcatcttttaagtcgagtacccactttgcagtttgatagtgctgaagcattgcgttgtgaacatgaagtacgccttttggtttgccagttgaacctgatgtataatgaagcagcataccatctgttctatctacccactcaatttccacctctttattcgccgcttctaatcgctttagaaaatctagttgaatgccttcttcttctacatttccccctacaaggagaatgtgttttaaagctggcaaatctttcaccggaacgcggctcagcagttcaggcgttgtaattaacacttttgcatcactgtcttgcaaacgatcttttactgcaccttccatgaacgcttcaaataaaggcccaacaatagcgccaagcttcaccgctcctaacaatgcaaaataaagttccggagagcgaggcataaaaataaacacgcgatctcccttctctacgtctgcttgttttagcacgtttgcggccttgtttgaccattctttcatttctttgaatgtatatttttcattgcgctgcgcatctcgataataaagcgcaactttatttttacgcgtagagtttgcgtgcttatcaattgcttcataagctgcatttaatttacctgtttcatgccatgaaaattccttctccacttgtgaccagtcaaaggtttgatacgttttatcgtagtcctgtaagttgtataccccttcaattacaggaagcgcttccaccttcatcacaaactcccccttatgtataaaatttacaaacctattatataacaaaaatagacttttcacaattttataaaaattatttgtcggaattgggataatagtctcccttgttatatgacaaccttgtttatataagtgtcgaattaacaagaatctcttttaattttctattctatgtttttaaaaaaactccttttcttttatttaattttttgaaaacgctttaatacagagttttttttatattataatacagataagactgcttgaaggtggtgattcatgtgaaacattcccaaacatacaatatgaaagaactaaaaacagctgttggagcaattgttattgaaggacctgtctcctcacagaccttgcaacaacttgattttcatgagcaactaacggcctttcgtccacctgaacagcaaaaagaagcattgatcgagattgccaacttgcctgaaggtagaatcattattgctcgccatcatcatacaatcattggttacgtaacctttttatatcccgatcctctagaacgatggtcggaaggaaatatggagaatttaatcgaattaggagctatagaggtagctgctccatttcgcagctacgctgttggtaaaaacttgcttatcgtatctatgatggatgatgcaatggaagattatattgtcattacgacagaatattactggcattgggatttaaaaggaacagggctaaatgtgtgggattaccgcaaaattatggagaaaatgatgaataaaggcggacttacgtggtttgccacagatgatccggaaatcagctcccaccctgctaattgtttgatggtaagaattgggagaagagtacctcaagaaagcatgcaagaatttgatagcctgcgctttcgaaatcgctttatgtattaagctgacctttaagaaaaggagccgtgtctgatgattgttgaagaaatgatgaaaaccgatctcgttaccttaacccccgaccatacgattgctgaagctatgaaacttttagatacacataagattagacatattcctatcgttaatgaccttcatcacgtagttggcatcatttctgatcgagacgtaagagatgcaagtccatctattttagataatacttatacgtctgctcttctatccgagcctgtgcggatgattatgcaaacagaagtcattacagctcaccctcttgattttgttgaagaaattgcaagtattttttatgaacatcaaatcggttgtattcccgtcacaaaaaacaagcggttagtaggagttgttaccgagagagatctattacatacgtttattcagcttaccggtaccaataaaccaggttcacaaattgaaataaaagtagaaaacaaggctggcgtgctcgctgaagttacatccctttttggttcaacgagaacaaacatcttaagcgtacttgtctaccctgatgtagatgaacgatataaaatccttgtgcttcgcattcaagctattaatccattaattagtataaatacattaaaagaaaacggctatgaggtgttgtggcctaaattaccggagatgacgtaatgactagtaatgctgtatttatttattcagatgatattctttcgtacaaattcagcaataatcatccgtttaaccagcttcgtgttcaactaacatatgaactgttacgggaatttggcgctttaggcaatcaagatattgtattaccgcggatggcatctgatgaagaacttcagcttgtccatgatactagctatattcaagcggtaaaattagcaggaagcggcgagctttctgttgaaaaagcagcagattttggtcttggaacagaagatacacctatgtttcccaacatgcatgaagccagtgcatttttagttggaggtacacttactgctgtagattatgtgatgactggaaaagctaagcatgctctaaatttaggaggaggattgcaccacggctttcgaggaaaagcttccggcttctgtatttataacgatagcgcggtagccatcaaatatatgcagcaaaagtacaacgcgcgcgttctctatgtcgatacagatgctcaccatggtgacggcgttcaatggacattttatgacgacccttccgtttgtactctttccattcatgaaacgggacgctacttgtttccaggtacgggaaacgttaacgaacgcgggcacagtgaaggctatggttattcatttaatgtgcctgttgatgcttataccgaagatgagtcttggctcgacgtttataagacctctttaaaagaagtagctgctttttttaaaccagatgttatcttgacacaaaatggagccgattctcattattacgatccgctcactcatttatgcggcaccacgaaaatataccgtgagattcctaaaattgctcatgaaattgcccatgaatactgtcagggaagatggattgcggttggcggaggaggttatgatatttggcgggttgttcctcgggcttggtcattcatttggcttgaaatgattgaacgaaaggcagaaggcatgcttcctctgtcatggcttgaaaaatggacaaaagtatcgccccaccccgtttgcacgcagtgggatgatgaacctaatatctatcagccaattccaagaaaaccagaaataacagaaaaaaacgctcaaactcttgagcgcgctctttatcctattcgttctcatacatctcattcttaaaaaaaggctatacaagcgtatggcctttttcactgtgcttcgggatctgaaataataatttcgacgcgtctatttttttgtagattgtcattagacgtgttcggaacaagcggctttgtatctccatatccaagtgcttcaaagcggttagcagaaagagaaaaatggttcgttaaataacgtatgacgccgctagcacgcgctgccgatagttcccaattagatggataacgataggtgtgaatgggtcgattgtcggtatgaccttctactttaatatcatttggaatagtactgaataaccttcctaattcatctagaaaaggagtaccttttttcaaaatgtccgcttgtcctgtttcaaacagcacctgttcttgtaaaataagcacaactccgcgtttatctcgcttagcagtaatgacattctgaagcttattttccttcaggtagccctgcactttcgctaaaatgttatccagcttttgagactgctggctcttttctacagaagctaatgagccaccgcttgtaagcgaattgacaacggtctgaaacttttgattatcaacgctagacattgaaaatagtaaaataaaaaaaactaatattaacgtcaccaaatcagcaaatgttaccatccattttggcgactgtgccgaatacctttttcttctacgcttcacgaacgtgttctctcttttcttccagctttcgtttttcaacaggggcaaatacttttagctttgcttgcacaaagcgagaattttgacccgccagcaagccgatgacaccttcaataatcacttctttaacaaaaagctcatgctccgttttaccagctaatttagctgcgattggctgaaaaaacaagtttgaaagcagcgccccgtagaaagtcgttaaaagagcaattgccatgttaggcccaagcgacgaaggagtattaaggcttttaagcattagcactagcccaacgagcgtcccaatcattccccaagcgggggcataatcgcctgctttttcaaacatacttcgacctctcgcatgtctttcttccactgcagctatttcagcttcaagaagctctcgaatcatttctggttctactccatcaatggctagcaaaataccttttttcacaaatgaatcatcgatttgttcaagttctgcttctaacgatagaagcccttctcgacgcgctttctccgataaatgtacaaatgttcctacaatttcttctacgtttatttctttcgattgaaacgcttgtttccctactcttcccatattttttaattgttttaaaggaaagctcacgcacagcgtaccaaaaacgcctcccagtacaattaaaatcgatggtacatcaataaaagctaaaaaaccgctcattcccccacttgaaataaccccaaacacaaccatagagataccaattagtatccctataggtgtgagcatatcaatttttttcatattctatctccccgtgtctgaacttggattcgttcttattcattcacaggtattattttgttgattgtctgaactcgatgcggtgaggaagctgtacaatgctgctgtctaccgtttctttgttcatgtattttgttaagagacgcatcgctactgcaccaatatcatacattggctgtacaacagatgttaactgaggacgaaccattgttgaaagtcttgtgttatcaaaaccgataacttctagatcgtttggtacattcaacccgcggtcttgtgccccgtgaataacgcctaatgccatttcatccgttccaacgaaaatagcagttggtttttcatcttcttctaatagtttttcaaccgcttcaatacctgaatcgtacgtgtagtctccttctacaatataagaatcacgtacaggcaatccgctttccgtaagagcacgcttgtacccttttacttttttcgcatgattgatcggttcttctaacgtacctgaaacgaatgcaatatttttatgaccgctgtcaattagtgattgcactgcatcaaaagctgcttgttcataatcaatagttacagatgggatttggttagttgattcgattgatgctgcaaggacaactggaaccggtgatttttttagctcttctacgtgttcttccgttacattcccactcatgaagatgattccatctacttgtttaccaagcatgttatttaaaaggtgaagttctttatcttgattttgatcggagttacttaagatgatattatatttgtacattgttgcaatatcttcgattccacgcgctaactctgcatagaaaatatttgaaatatcaggaatgataactcctactgtcgttgtttttttacttgctaatccacgcgctactgcgttcggacgatagcctagtctttcaattgtttctaatactttttttctagttgatggttttacatttggatttccgtttaccacacgagaaaccgttgccatcgacacgcttgcttcccttgctacatcataaattgttacgttcacaacaaacactccttatcgaaaaacatttcgtttattttatccttatttcatttcttgtatttacgtatataaatccatcttcctttatagaatggctatttctagctccttcactcttacatacagcttagataccctgtatgcatctaaatcattcctgttatgcccttattattacgtgacaaagacaattttaccagtttatatgtaacaatgtaaaagacggtgtatattaagtaaataaaaaaagtgaatcgcgaatttatatcatatgcaatcacagaatgatagcgaatatctgtaactactatacgatactatgtgcttcatcgcaacgtatttaccgcctttttccgacaagtttcacgagaatttcataaattcttgttttttggatttgcacttattctttcctattttgacaaaagttatcgactgttttcaaaatacgtgataatttcgcttatctttattataacgaaaggcaaacaagcttgaaaccattaagtgcctcaaacttgtcataaaagtatacgaatttttcatttttacgtttttttataaatttaagttacatataggttttagctgcttcataaattctgtaaattgcgggatatccatttgctgagctgaatcagaaagtgctaccgcaggatctggatgaacttctgccataattccatctgcaccgatggcaagagctgctttagccgttggaacaagtaaatctcgtcttcccgttgaatgggtgacgtcgactaaaacaggtaaatgagtttcttgttttaaaatgggaacagctgaaatatccagcgtatttcgcgttgctcgctcatacgtacgaattcctcgttcacacaaaatcagctgatcatttccttttgacacaatgtattcagcagcattaataaactcatcaatcgtagcggctaagcctcgctttaataagacaggcttcttcatcgcacccgcttcttttaacagctcaaagttttgcatattacgagcaccaatctgaatcacatctacgtattctacagctgtttcaatatcagcggggtcgacaatctcactaataacggctaaatcgtattcgtcagctactctttttaaaatttgcaatccttctaagccaaggccttgaaaatcataaggagatgttcttggcttgtaggctccgcctctaagcatccgcacaccctgctgcttcacgacttttgctacggctgctacttgctcatagctttcaacggaacaaggtcctgctacaaaacgctgaagtccgtcaccaattgtttctccttttaccgtaacaattgtattttccggcttctttttacgggatacaagaagtgctttacgatgatcatcttcttgaagctctaaatgagctttgaaaatctctttgaaaatatgttgaagcgtagacgtttgaaacggtccttcattcttgcttaaaatcgcatcaagcattgctcgttcacgaacgggatcaaaccgtttggttgactgcatgccttttaactttcctatttcttgaacaagctcgcctcgctcattaataagcattaacagtttcatatttacttcgtcaatttgagatcgcaaatgctgaagatttgaattcgtcatgtacgtccaccctttcactgattttaaaaaatccgtttagcagggttactacataagatgatagatgatggaggatatatgtaaggggcttctctgcttttatgtgctaaactacatctattgtacgaaaaagcggatgaaaccgcaatcagcttataaaaaaaagaggttgaggcatagctaaatcgctccaatctaaaggcgaaaaaatggaataaacaatctattatggattgcttgtcatacagtaaacctacgttcaccctttcaatgaaaaaatccgaacgattaatgttcggatttttcttttactaaaatactttttcggttagtgagctacgtttttcgctaattcgtcttcattaatgttccagtgagaagcatgccacttcacttttccatcttcaaacagaagcgcttgaggtgattcatgcttcacttcataggtctcagcgatatagttagatacatcacgtgaatcttgaacatgaagataataagaaggaatgtcttcatgactagaagcaaatgctgaaaatgcctcatgaccagctgcactaattggacacgttgtactgtgttttaaaaataaaaagcgattgttttcctttacaacttgttcgaactcttcaactgttgaaatttttttcatttttttcaccctttctatacttactcttaagtttacatggtttgagcgtttccatacaaaaagagtgctcagctttatgtatgatgctcataaattcatttataaggtggggtttttttctgcaatgaaacgattatttacttgttgttatccaacctaaattacatacaaaaaaagcgttcaccctatacggtaaacgcttttgattctttattatggccgtggcactgtgctttccacttcatctagtgctttttgagcttctgttagcttttgctgaacgtcttcgttgctttgagactcaacttcatcagcaagcacttctaagcttgttggcggtaatgcttcgtgttcaggatctactttacggaagtttttcaccttgtccactacttgtgaagattgctcagacagtgtttgtgataaaccagctgttttttctttagccgtttgagcaaacccttgtcctttttcaacagcgctgtttttcgcttgctctgtttttaaacgaacgtaagctgcctgctcatttaaatcagaacggaactctttacctgattttggagcaagtagtaatgccgttgcagctcctacaactcctccaatcactgttcctactaaaaagcctttatttgaagtgttgtttggtttatttggtttgtttgacatatgcgtctcctcctttaaagttcatccttatgaaaatgagcgtgagcgttgaaccgctttttcttttacttcaacaggtacaggctctgcttcaacttttttctgttttcttaattttatacgttcccatacgtctaatgcaacattgctccattgaacaacttgagcaacggtttctttattttcttctactttctctgaaacacttgatgatacgcttttaatagacttatttaggtcttggattgagtcacctacgcctttaacagaatccaccactgtgttcagcgcttcggatttacgctgaatatcttcagctaacagattagtcttatgtaaaagtgcagttgtttcagctgtgattcctgtcatttgcttttctacaccgtctaaagtacctgccactgaatttaatgtgtgctgaacggatttcaatgttttggacacggaaaccaccaggtaaaaaatcgcaatggcaacaatagcagcgcttaaataaagaataataaccatctgtgcaaggcacctcctattttcttctctcttgttataactactttcccaattttataaacaattaaaccttctattccctatagactctttaactttaccatatcctctctgcttttattcagaaaaagggaagattgtacattatttcgcgatatatgagttatttcccttcctaaagaaaaaaaggattttaaagcataaaaacaaacaaaataagctcagtggggtacaatagaaagtgaatcaccaatcattgctattttaaggaggcactatttatgaaagaccctagaattgcgacattagctaaaaatttaattaattattctgttcgccttcaaaaaggagaaaaagtattaatcgaaaactttggacttcagcgcgaacttgtgacagcacttgtagatgaagcgtacaaggcgggtggttatccatttgtactgctaaaagatcattcggtagaccgcgctcttttaaacggtgcacaagaagagcagttcaatatgatggcagacttcgaagcaaatgtgatgaaagaaatgaatgcttatattggcttgcgttctggttcaaacatttttgaacaatcagatgttccggcagataaaatgaaaatccaagggaatacgatcggtaaaaaagtacatagagaaattcgcgttccaaaaacaaaatgggttgttcttcgctatccaaacgattcaatggcgcagcttgctaaaatgagtacagaagcatttgaagatttttattttgatgtatgtaacttagactatggcaaaatgagcaaagcgatggatgctttggttgagctcatgaaccgtacggacaaagtgcgtttaacaggtgagaatacagacttaacgttctctattaaagatattcctgcagtgaagtgtgccggggaaatgaatattccggacggtgaagtatacacggctcctgtacgtgattctgtaaacggaacaatttcttacaacactccttctaactatcaaggctttacgtttgagaatgtatccttaacatttaaaaacggtaagattgttgaagcaaccgctaatgatacagaacgcatcaacggcatttttgatacggatgaaggcgcacgttttgttggcgaatttgcgattggcgtaaatccatatattcaacatccaatgcaagacatcttatttgatgaaaaaattgacggaagtttccacttcactcctggcgagtgctacgaagatgcgtataatggaaacaagtcaaatattcactgggatatggtgatgattcagcgcccagaatacggcggcggtgagatttatttcgatgacgtgttaattcgtaaagacgggttatttgtcattgaagaattaaaagcgttaaatcctgaaaatttaaaatgagttttgaaataaaaaaggcactctcctgagtgccttttttttatgatacggtttgctgatatagtttttcaaacttttgaatgtctccagcacccataaatactaatacagcttcattatggtcttttaacgattcaattgtttcttcattaattaattcagctccgctgattttgcttcgtaaatcttcaattgataacttaccttgatgctcacgagctgatccaaaaatatcacatagatatactttatcagcgtgctgtaagcttgctgcaaagtcctctaagaacgtttgtgtacgcgtaaaagtatgcggttggaaaacagccacaacttcacggtttggatacttttgacgagcagctgaaatcgttgcattaatttccgttggatggtgtgcataatcatcaattagcacttgtttgccaacgttcttttcactgaaacgacgttttacaccttgatatgttttaaaacgctcttgcagcacagcaacgtcaatttcttcataatgacaaagtgcaataacagaaagtgcatttaagatgttatggtcgccataccctggaatttcaaatgatgcgtggaatgtattacgaacgaacacatcaaatgttgtgcctgttgtgctttttacgatattacgtgcttggaaatcattttcttcgcctaatccataataaagaacaggtaccttcgcctgaatttgctgcagatgttcatcatcaccacaggcaataattccttttttgacttgaagtgccatctcttggaacgcgctgaatacatcgtcgatattggcaaaataatcagggtgatcaaaatcaatattcgtcataattgcatagtctggcgtataagataagaagtggcggcgatactcacatgcctcaaacgcaaaatacttgctgtcttttacacctttacccgtaccgtctccaattaaatatgaagtaggttcagctccttgaatcacatgcgctaacatacccgttgtggatgtttttccgtgtgctcctgttacggctacactcgtatactgtttcataaagtcacctaagaaacggtgatagcgtacaagcttgactccttcttttgaagctgcttctgcaatttcctcatgcgtatcaggaaaagcatttcctgcaattacagtcatgccgtctttaatattatttttatcaaatggtaaaacaggaattccctgctgttctagtgctttttgcgtaaaaatttctttttcaatatccgatccttgaacttgaaagcccatatcgtttaggatttgcgcaagcgcactcattcctgttcctttaatacctacaaaatggtaaactgtcatataaagaacctccaacattcgtctatctgtaagacagtatatgacggttatctagaattgctcttacaaacgtatataaatgtcgtttgattgctgatttcacgataacatccgtacattatatcacttcttataacataactccatgactccatttctactctcttcccttgcgaaacggccttttattttggcttcatcacatagtatatagcctgctgttttaaaaatgagcgccatgtcattgcattttttttgtcattatattgcgttactaactgttcaatgcgttgtttatgtcctaaaaagaaagagtcaattaacacgtcatatccgattgattttatttttcgaatccaaattacttgttgttcctctaaatttgcaaatcttcctcttacatctttgatgataacctgctcatttgtcaatggggtatatccttttaagaaaaacgaattaggtactttagacacaataattggctctagtacactcgtcaaaaaaaaggctccttgaatcaaaaacgactctgttttctgcttcgcctgatcagctaaaaaaagctgcagcagggttttcccctgaatggttacatattcaaatgcaaaccactgaaaaaataattgttcataggaatcagacagaggcgcctcatgaggtaagtttactaactctttaaataaatgtgaagcccgcactttttctcgtatattcgtatagcggttcacaaaaaagaaatattgattgtaaaagtcgcaaatagcattatcagactgaagctgcttttgttcacgaatttcattaaagttaatcagttcatgattttcttctctcattactcttcactcgtactctaattattttagtttgtcctctttatacgccttcagctcatatgtttctgctggtgagaaatgatagcaaactatcacatgctaaaaaagcaacacacacattatccttacatatagtaaatcattttactagttctgacaaaccttttcctttttttcttcatggatttcttccaaaatctctactcaaattctgtataaacgaacttaaagcagaaaaaaaagaggcgacggatacagtgacagagcgttaactcacacaatgctgtatcctgctgatcttgcatagcctcttttttaacctacatgtagaaaaacagcttaaaatgtagaagtggctgtttgactttccatttcctgaagctcgttttcggtaatgagcacatctctcggcttgcttcctcttgcttctgaaataattccttgctgctccatcatatcaattaggcgcgcagcgcgattgtaccccattctgaagcgtctttgcagactggaagtagatgcaccgccttggtctagcacaaactcgcatgcttcatagaaaagctcatcttcttcatttgaagcaaagctttgctgctttttcaacaaatcttcttgatcaaataggtatgttggcttcatttgttttttgacatgatctacaacgcggtcaatttcttcatctgaaacaaagttcccttgaatgcgaacgcttttagaagagccgttttcaagaagcagcatatcacctttacctagcagcttctctgctccccctgtgtcgataattgtacgtgaatcaacttgcgaagaaacagaaaatgcaatacgcgttggcacattcgctttaattaagcccgtaatcacatctacggaaggacgctgcgttgcaagcaataagtgaatgccacatgctcttgccttttgtgcaatacggcaaatagcttcctctacttccccaggagataccatcattaagtcggcaagttcatcaataataataactagatatgggagctccccgcttttttcattatgttcttttacacgttcgttgtattttgtaatatcacgtacgcccgcatgtgcaaacaattcataacggcgctccatttcctctactgcccattttaaagctgtagtagctgctttagcatccgtgataaccgggctgactaaatgcggaataccgttgtaaggagctagctcaaccattttagggtcaattaacataagcttgacttcgtgcggcgcagctttataaagcaagctgacgataatagtattaatacacacgcttttaccagaccctgtcgctccggcaatcaaaccatgaggcattttattcaagtcagtcacaaccggcgttcctgaaatatctaaccctaacgccaccgttaaaggagagttatcttttctaaaagaaggatgcctcaaaatttcacgaattaacaccggcttactttgacgatttggcacttcaattccaatcgtatttttccctggaattggcgcttcaattcggatatcacgcgcggctaggctcagtttaatatcatctgttaaattcgtaattttgttcactttcacaccgggttcaggatgtacttcaaatctggtcacggtaggaccttgcgtgacgtttacgaccttagctcgaacgttaaagttttttaatgtcatatccaaaagctcacgctgctcatccgcccattgattatcttcttcaatagtagctggaggaatgttaagcaagttcattccaggaaatgcataaggagaagaagcctttacatttacaggttcttcagcttttaacgaagcctgcggaactgcttctttggttttttcaccgtgaacttcttcttgcctacttacttccgtttttttttgcagagcttctgtctcctgcctttggtatgaaccttgagacggctgacttttttctcgagggctgttattcatctttgtgcggtcttttttcagcatcatcacgttaaaaggtactaatcgcttaccgcgaactcgttcagcatttcctggctgttctgcaggtacaagaggttctacagttgactcttgctgtacttgttcttgtaactcttgactttcctgcatactgctctcttcctcttttatcaccgaattttcaagttcttggtgaacaacagccgatgccgcttctggttgccattcatcagctgcgggttgcgatgaatttaaactttcagaattcagctcatgttctgcttccatatgaacactgtttgctggctcttctagaatgacgtcactttctttctcagcagctggagcttcttctttctttctaggctttagtacttctacttcttctgctgcttctgctgcttctgctgcttgtaaaaaccctgcgcttccgtccatcaacgtttctacttcttcagtctcatttcctatctcttgttggagagaaactgatggttcagacggacgcgtttcctctgaaattggaacttcttcgggcgctgtcatacctttcgctaaatcccagtcaagagtgctctcttgtccgactaacggttcgaccgcgtgtgattcttcaaaagttggcacctcttcttgttcttttacggctactgaagaacttggcttttcttcaggaaatgatagcttctctttttgattttcctcatattgcttccactgagcaaaacgctgagaagacagttgcatcatttcttctgtttcttgaatcggtgcttcttcggccataggcttagaaactggttttcttaacggctctacaacagctgtattcatcgctcgtcggtaaatttcatcttcaaacgctgcttttgataactgtgtactcggaagctcatattctactacttcctcacttccgttttgtccaacattagaaggccgcttattaaacccatagacaggtgaaggaatttcagtcggacgaaacggacgttttcttacttgcggaaccgcttctttcttttcagataccgtttttaacggctgagatactgacttaggctgtgttagcgccgacttgcgaacaggctcttgataaaacggagccggtgccttttttgttacaagccttggttcatttttaggcggtgctgccttttttgcttctcccgtatcatcaattaaaggaaaacgaaacgttccttttggatattgataagctacttttgtatgaacatcttgctgttcttcactgtaactccgcttttgcgttctggctgagtgtggaacagaaggttttggcgctgctttcatcactggcttttgatgaactgactgcatttgtttaggcttaggagccttctttttaggaattgttttttctctatttaaagggtattcttccgttgtatttccatgttcgtctacaacaatttctttcacttcgtatcctagtaaataatccattacttttcgtacaaaacccatttttatcactctttctatcagactatcttacttcgtgtagcctcttataccgcagtgctgcgatatctacaaaaagctatccatgcatcctttatttacctttggcctcaaagtattctctgagatggatatatatactatcttttcatttatcattctatcacgtatgcttgaactcttactataaaatctactattttgcttcccttatttatacagtaaaattcctctttgcaaaaatatttttttgcgtctagttagcactcataattaaacgcgaaaaaagccactagtatatactagtggcttttaattttatcaaacctttttaagaattgacaattgcttttcagcaactgtaacgctttgaaatatacgtgtaaaaaaacatcatgcttttgccctataaatcagtatcgcactctgcttttatgcttgaaaaggctgacctacttcatatttgtcttcaagtactagaattcctttttcttgaggagcgttcggaagcgccagctctttagcagagcaaatcatacctgaagaaggcacaccgcgcagctctgcatctttaatgatcataccacttggcataaccgctcctacttttgctaccacgactttttgacctgcgtctacatttggtgctccacacacaatttgaagtgtttctgtgccaacatctactttacagatgttcagcttatctgcattcggatgcttttctttttcttgaacgtatcccactacaaatttaggagataaatccacttcaagtttaccttcaaaaccgctttcgctaagtacacgatttacttcttcgaccatttcttctgttaattcaagagaaccatttccctctacttttaacttagaagaagcatgaaaaatgttatagccagctgttgtatttgatttttgatcaaagatacgcacaacgtcgccttttgtttcaaacgtgcgattttcaattgcgatatcttctagcttgacgattaacgtatcgccgataccttctttattataaaaaagattcataattagtcccgtcctttactgcgatttttccctagaataaaaataggttctagctcaccgttttcgtataaaaatgaaagagctgtgatgggtacacgtccacttgcaaaaaagctcatggtcatttgcgcaagaatatcataacccgtttcgttttggatatcagctagaatcagcacatcttgatgaggtactgctacagccattgtgcccgaaacactagaagcaaaatcttgcaaaaatgcctcgttaagaattcggcttgcatcgtatccatcgttctgatttacaaaataaaagtcattgcctgctaccgtatcttttttatgtgaaatcggcaaagagcgaagattaaatttagccatttcccgcactgcggatagatctaaattttccttacgaattagtttctcatctaatagacgatatgtattgcctaaatcaagcgcataataaatgcgtgtttcagctgtatgttcatcataaatcaacggcacgtcttcattcgatttatctggaaaagacgttgagcgaataactggataaatgcgcttttcttttcccgttacctgctgttcatcgttcataacacgaagagcttcttttatataatataccatttcatctagagccgcttcctttttttcttcccattttgcaattagcccaggtaaagaaatggttacaccttttttcgtttcctgatgttcaacgcgcagcgtatctttttcacgatcaaataaaaatgaccaatccgcacccgttaatcgctcttctagtagttttctcatcttttgactattcattttcgccatatttacgcctccttttctcatttttatgtatgaagactgatagctgtagatcgctatcagtcttcacttgatttatgcatttaagccgttaataaactcttcaatttcttcttttgttttacggtctttgctgacaaaacgccctgtttcttctccgttgctgtaaccaacaaagcttggaattccaaagatgcttaattctgcacaaagatcgataaagtcgtcgcggtcgacatagtgaaatgtatactcgctatgattcgcctcaatttctgggagcacgggctcgattactcggcaatctgggcaccagtctgctgaaaacatcatgatatgttttccttctttaatgatttctttgtattgttcaattgtttgcattttttccatttttctttcctccactttttcttttactttcgtatttaaacggctaaagccctatacattatttaatccttctacatcaaaacatagtatatgagttgttgcaactatcatacactgatgcttttctattataaagggttacaaagaaatttcctattgaacagcttgatttttcctaaaatcaagctgtccttttagcattaaaacaacctgataaaacatagcggtccgatctaaattcccattggtgaaaataccgattgctccttctttttttcgaatattcttttggtttgtatacacttccatagcttcggctaattcttttttatcatgacgaagcataccggctaccgcttcaggaagccgaatacgagcccctccacctaaaatcggttcaaggtcctgagaggtaacaagacttccccaattgcaaaggaataagccatgaggcgtttcctgcacccctccttcaagcccaataccaatatcagcacctgtctctttcacagcagcacgcgcgcgattaaccgctccttggatggtttcttcgtcagaaaaaggctgtggcgacaccccggactgcacggctacctctacatatgtaaaagtatctccaaatactttttttactgcatttacttttgttggatttttcgttccgattgcaattttcatttttttctcctgtcattatgaaacaaagcaaccgcaaaagcagctgctttgttcttttttatccgttttgcttaatcgtatcgagcgttgtttggtctgtagaacgtacaagtttgactagtaattcttttgcagctgcatagtcatctacatgaatcatagaagcatgagtatgaatataacgtgaacatacgccgatgaccgcagaaggaactccattattagaagtatgaacgcgccctgcatccgtacctcctggagaaacaaagtattgataagggatgctgtttgtctcagctgtatctaaaataaattctctcattcctctatgtgtgaccatcgtacggtcaaagatacgaagtaatacgccttttcctaattgtccaaacgcatttttgtcgcctgatgtatcgttagctggactagcatctagtgcataaaacaaatccggtttaatcatattcgcagctgattgagcaccgcgaagtcctacttcttcttgcacagtagctccagaatataagatatttggcaatttttcattttttacttcttttaataattcaatcgcaagtccgcacccatagcggttatcccatgctttcgccagtattttcttttcatttgccattggcgtaaacggacaaatcggtacaatttgatcgccaggacgaatgcccatttctgctacttcctgcttactatctgcgcccacatcaatcatcatatttttaatggccattggcttgttgcgctgtgattcgtctaataaatgaggagggatagaagcaattacgccggtgatagaacctttttttgtaacaacatggacgcgctgagctagcagtacttgactccaccatcctcctagagtttgaaaacgaagcattcctttatctgttacagacgtcaccataaatcctacttcgtccatatgtcccgctaccattactttaggacctttttcctcattatagcgaacgccgaataaacttcctaacccatcttgaatgacttcatctacaaggggttcaatttgcgagcgcataaatgaacgtacttgatgttcgtttccagcggcacctggtaactccgttaatgttttaaatagagatagcgtttcattgttcatatatactctcctttatgtatcattttctttattgtatcgaaaaccggaaatagttgctagttccgtccttctcttctacaactcaacttaacaaagcattcgacaatttgatataatgatgaaaacatatccttaaaaagcaggtgaataacgtgaaatggactcaactaatagcaggagctgcagtcggatttgcaagcgcttatattcttcaaaaaagaaagtcgtcaatttcctcatcggaagcccttacgattgttaaaagcgcttttaaacaaaatggggcaatcgatggctcatggattgaaacaacgactaaagtcattcaaaaacatggtctctctttttatggttatacaggtggaattagcagaacacgtgatgcaaaacaggaacattacgagtttttcattgataaaaaaagcggttctattattgaattgacgctgaatgcacccgtttaatttcgtcaactatttctcctttgttatcccattttacagctcgataaaaagcatcatgataaaaacttagccaagcttgattctcataggcataagctagccactgctgcttttgttcaatcgaagtcattggataatcatcatatgccattacccataagacattttgatgtgcatgtgttggcaaaagatcgcccatgtgcactaagatgtcattgtttccttttaatacaactacagcatgaccatcgctgtgaccgccggtatgatgaaccgttactccaggcacaatttcatctttatcgctaaatgttattacttgatgctgaataaattcccaattttgtttccaatacgtatttttagaacgtatattaggatttctcatttcattccactcgatttcactaacaaagatttttgcatttggaaaaacagaggaaaaatgtccgttggtacactttgttaagcctgacgcatgatcaaagtgaagatgcgtcataatgacatgagtaatatcttcgcacgtaaaccctaacttttgtaaatcttcagcaataaatgattcttctgttacaccaaaatgacgcttttttttctcatccaacataccattccctatacctgcatcaattaacatgaggtgtttttcagtttgaacgagcaaaggatcagtcctcattggaattcgatttccttctgagataggatatttttttgtccaaagctcttttggaacaacaccaaacattgctcctccgtctaaatgattattccctccacgaagccatgtcacttttaactcgcctattgttaacgtttccattttgcacctccattatattcctttttattttatcactatctccttctctttttgaacaaaaaaagactgaggaactcagtctttttcgttcaggtattttacttcacagcggtaaatacggctgcctttttgtgaaaatttctcttcatattccgtcataacattgccttcaaaatcgcttttatgcaaatctaagctaatgtatttgagaagaagcccatattctgaaaagcttgtcaatgaatattcaaatagctcttgattatctgttttaaagtgaatttctccaccatcaaccagcaggttttcatacatgcttaagaacgttttgtatgtcaaacggcgtttggcatgtctcttttttggccatggatcagagaaattgagataaacgcgatccacgtcattttttgcaaaaaactcactaagctggttagcatctacattcaacagctttaaatttggaagctcttcttcaatcaatcgttctagagcacttaagatgacactttcatacatttcaattccaatatagttgatatgcggattttgtttagccatccctactaaaaattggccttttcctgttcctacttcaatatggagaggattttcgcttccaaaaacctctttccagttccctttatactctgctgggtttggaaccacgtattggggattttcagcaattttatcttttgcccaaggtttgtttcgtaatctcatgttgcacctctttaatgtattttgacgcattgaaaatgtcggttattcgaaacaaccgacattctcatgcataattgtgtttagatagaaaaaaataagagcatcatacgagaaaggatgatgcttaatgcctttaaatgccgaacaccaaatgaatatattaaaagatattttatctaatcatcaaagtgattgctgcggaacggttgcggaatgtgaacaggttgaacgtttaattcaatcaatgttagcaaaaggatacgctagcacagacgtacaagcaacactacaaaacgtgtataaatacacgcaagatgcaaaaagtgctgctcatttagacgaacatattcaaaccaatcaacaaaatttatcacaatgggtccaagaactatctaccttgtcataatctttgctactgtgcttgaatgtcgttgacgagcaaaatccggagatattcaagccagtaattcatttcagaatgttcatttttcgaacgatgccattcaatgaataaaatggtttgacttatcacataccacttcattctctttttcaagttctcggttagttcaaccccataatgctcaagccattcttcccactgagatggattgatgtaccaataaagcaataaacctaaatcaatagcaggatctgcaatcatcgctccgtcccagtcgattaaatatagctgcgtattctctccaagcatccagttattgtggttcacatcacaatgacacacaacatatttatctgtctgaacggacagaagctctgcttgtaaataactgattccctgctctacaatactttctttttgaagtcgctcgtccacattctctacaatatcggctagcacgtcttcgggaagaagcggtgttttccccaaccttttcaacatatctaataactcgtttgaatgatgaattttactaagcaattctgtcactcgactcgaattcatatcttttggttttaattctcgaccatctagccagtgctgagctgtgatcacatctccattttccattcgtcttgtccacacgagcttcggtacaattccttcagctgacaatactgctaaaaaaggtgatgaattacgctttaaaaaaagctttcggtcttgaaattttgcaaaataagcttctcctgtcgctccgccagcaggagtaatttcccattcgcttcctaatatatcttccaaccaattcaccttcaatttcaacacacacatttcgtttaaaaatttcactcaataaagcaatctattaagacatcatgacgttattttcttagtaaataaaaaagacggctattgaggatatgtatcaatagccatcctttataaatattatctccatcatacttttttcgtcaagtggttgaagacaataattacgtttgaaataaaataagaacgctaagctttgaaacgtttatagcattatcctctatagtaggatacccatttttatatactttacaatgatcaagtgctattttccatggtccttctggcaaaactactttttcttccattaggccttgattaaaaaacacaataatattcttccacggaccgtaagccaatacgtttgataagcaatagccaataacggattgcggcgtatttaggaaagagatatgctgcctaatcgctgaagcatctcccaagcgaaatgcaccgtgctgtttgcgaatacgaatcagctcttgaacccaattcacgtcaggagaaaatttgatccgtcgattccaatcaagtgcattaatatcatcgggtgaattatagctgttctctacgccttgtttagtgcggtaaaactcttgaccactatgaagaaacggtatgccttgcgaaagaagtacaatagcagtagcaagtcggtgacgacttctacgtgtatcttcgtgttcttctccatttgaattcgttaacttatcccacagcgtatgattatcatgtgattcaacgtaattaactgattgtgctggatttataaataaagcccggctgtcttctttatccagaatgctccccgctatcacagattgcacggtctctttttgatgaatacttccgctgataaaacctttttcatatacatcaaacgtgcttccttttacagaatctcgaaagcgatcattaaaatagccgatttgaggcgtttggcgggcattcgccataattgctttttgattatagggaataggagtatttaaatcccagccttcgccaaacaccaaaatagtagaatcaatttcatttattttttcccgaataatgttcatcgtttctatatctaaaatccccatgaggtcaaagcgaagcccatcaacgtcgtactcttttatccaaaacaatactgaatcgataataaacttttgcgccattttccgttcagaagcaaaatcatttcctactcccgtcccgttcgaaggcatcccaaactcatcatgtcgaaaataatagcccggaacaattttttcaaaaggtgattcctctcgtacaaatacgtgattataaactacatctataataacacggaatccctgttgatgaagtgttgatattaattgtttcacttcagcaatacgagtggcaggatttgaagggtcagcggagtagcctccttctggtacattaaacaacaatggattatacccccaattataagaagcatgagggtttaattcatctactccgccaaagtcgttaataggaagaaattcaaggtgggtcactcctagctcttttaaataatgaagacctgttgttttgcctggctgcccgcttgattcagtaacagctaggtacgtgccttttttttctatcccgcttgaagggtgaatagaaaagtcgcgaacgtgcatttcgtaaataacggcatccgttggctgaaggaaaggtggcttttcatggggatgaacataaactgtatgaagatttatcagaactccgtattcactatttgctgtagctgcaacggcataaggatccaccgcttcatttgtccggccgtttacatctattaaaaatcgataataatacccttctttatctaagggaagtttcttttcccatacgccttttctttgacgagccatgacgtacagttcttctttgccgctgtttgcatgtattaattttaaaatcactgctgatgcagtcggggcccaaatttttatcataatatgatctgaataaaaggctgcacccaaatcattttgattataataaaatctctcatcaaactctttggttcgtataacagcccctacctgcagcggaactttctctccgtaattatcacagataacgtacgactgtccaatttctatgctaccttcgaccttgccttcatatttgataaatccttctaattcatgtacgttttcaatagagatggtctcatgcatttgtgtacttttaatcacaaaaaaatcaatttgaccttcatgataagaagttggaactaaaagagtaatacgatctatttgatctaaataagcttgaaacttattatcaccagtcatccttttctcctccttatgccaattacctctttagtagcattatatgtagtaaacgcaaaaacgaaagcactttcatagcttgaatgttcgtattattcacctgcttcgaattcccggtcaaaataaatactctggctgtgttcgagcaatacttgagctgctttcatctgcttaaactttaaaggtgctttagatttcctaagttcataaaaccactcttcgtactttctagcatctacaaattcaacctgataaggctcagcagcgtaatcaatatatccatttctgctcagtaatattttctttacgttatgttcaatatcgtgagtacgatagatgcttcggacaatttgctccgttcgatttaacccaattaaaggatttaatatctttttttgatctcttcctcttaactctgtccaaaaattttcttttgaatactgaaaaacagcgcttttatatgtttctattaaacaaatacagagggtttccgttggagtaacaataacgatatctccttctaccggagctttattaatcatgaaaacaggcttgtacatcacgagacacgtatcaggaaagcgctgaataaaataacggagagcttcatcatggtaatatttacgatctgcttgtgagaactcaaataaagtggatgtagcccatttcatttgaagatcaaatacattttctaaaaacaatattttcaagtcttccgctgtttgtggaagagttgtaaacctcaatagctcttgattttccacgctatcgctagagaacgcttcttccacttcacacgtttctttttttcttgtaaaccgctcttttgccttttgcaaaaatgaacgttgagcttttatttcttcttgtacaggcggctcatgtaatagcccttcttcaaataattgctttgctttcttccaattatgcttttttaagtgattaaactgagacgtgtagtgataaacgtctttttcataacgggaaatataatcttgcaccttaagtagctgcgccacgtttacatcaatcccctaattaaaattcctctaaaactttcttcgccgatgatttctctattatcatcggcgttttcttttctttgataagagcgatttttaaataacctctctccatgcttttatgttcatatgctactgtgactgcaaggaaaaagatagtatttttttatatttaggtttgctagcaggatgaacttcaaaaagggcaaacgaacttacttgaaactgttcttcaatcgacgtttgccttaactgttcttccaaaagtccggcttcccctccccacttctttgcaatcgtaatatgaggacgataaggacgtttttcgtacaggccgcttagatcttcccatacggcctgtatatccctttgcagattcataagcttatcatttggcctaaggcttacataaagcactctaggcttgttatacgcaccgaacacatcgtactgacctgtctgcagcgaaaaacttgaatgacgggaggctacttcttttaagcgcgtaatcagcttttcctttttgtcatctaaaaaccctaaaaattgtagcgttatatgataatcgtcagagtatgtccattgtttgaaaggaaaaggtattaattcctttgcccaattttctgcctgatgtgcaatggatacaggcacgttgattccaataaaataatgtttatcgcctttcatcaaatctctccttttctttttattatctttccccaattggttatgttcaaaaagagctagatctattttaaaggttttttcggatgaaatagagaggtttttctgaaaatctgtcatgtgcttaaaaaataagaatttgtgttatcatagaaacaatacagagaatttttataagaaaaggatgagaagaatgaaagttgttaatagtatggctgatttgattggcgagacacctcttgttaagttgaatcgtcttcaacctgcagatggagcatccgtttacttaaaactagagttttttaatccaagccgtagtgtgaaagaccgtgctgcttttaatatgatcgtggaagctgaaaaagcaggcttgctcaatgaaaattctactattattgaaccaacgagcggaaatacaggtattggcttagcaatgaatgcagcggcaagaggttatcgttctattttagttatgccagataccatgactcaagaacgaattaacttgttaaaagcatatggtgctgaagttgttctaacaccgggcgatgagaaaatgccaggagcaattcgcaaggcagaagagcttacaaaagaaattccaaatgcatttatgcccatgcagtttgaaaataatgcaaaccctgacgctcatcgaaaaacgactgctaaagaaattatcgaggcaatgaacgagttaggcaaagacctatctgcttttgttgctactgctggaacaggcggaacgattacaggaactggtgaagtactaagagaaaactatccaaatatgaccgttcatgttgtggaaccagccgggtctcctgtattatctggaggaagacctgggaagcacaagcttgtaggaacaagccctggatttattcctgatacgcttaatgtagatgtttacgacgaaattttaaaaattaaagatgaacaagcctacgatattacgcgacgcttggcttctgaagaaggaattttagtcggtccttcatctggcgctgcgtgctatgctgctatcgaggtagccaaaaaattatctcctgatcaagtggtcgtatgtattgcttgcgatacaggtgaacgttatttatcaagtgacctgttctcatttgaataataaaaaagcgaacgcaaaggcgttcgctttttttatttagctaattcgtaaatagcctgtgcataaatagctgttgcacgaagtaaatcttcaattaccatgtactcgtctttttcgtgcgctacttcttcacggcctgggaaaagaggtccaaatgccacacccgcttccaatgctctggcatacgttcctcctccaattgaaataagtgtaggttcttcatttgtttgttcttggtaaaccttttgaagcgtttgaataagctcatgtttttgatcgacatgatgtggcttagaatctgtaaaatgtttgatggtcatttgataagattcacttttttctttaatcgtatcaataatgtcgtcaatatgagctgatacaggatagcgaatgtttaaaccaaagtgccccgcttcttcttgattgtaagacatgattccaacatttatcgttaaatcacccgtgacctcatctttgcgatttaagcccattttttctcctagtgcatcttggactaaatacgcatttgcataacctacaaactgattagcttgttcatcaagttctaatgtgtgtaaaaagcgaagaagcataagtccagcatttttccctttatcaggcacactgccatgtgctgaaacgccttctaaagtaagtgtgtatacaccgctcttttctgttattgaaccttttaaagactgatcctttaaaaattgatcatatttatttttaatatccgtttcactatggaattcaagaacagctgttgcaagatcaggaaccatattgtagcgtcgcccagagacaaatgatgtaagctgaacgcttccctttgttccttcaattggctgctggcgaatttctacgtctgtaatgcctttttcagcaaaaatgataggaaaatcggcatcgggcgcaaaccccatagttggcatctcttcatgattgaagtagtggtccacacatctccagtcactttcttcatccgttccaatgatcattcgaacccgtttagatagaggaagccctaaatctttcacaattttcattgcataataagcagccatcgtcgggcctttgtcatcgattgctcctctagcaaaaattttcccgtcttttatttcaccgccgtatggatcaaccgaccacccgtctccttcaggaacaacgtctacgtgacaaagaatgccaagaaggtctttcccttctcctgcttcaatatgacctgcatatccgtctacgttcttgacagaaaacccgtcattttttcctttatttaaaagaaagtcaagcgcttgagcaattccaggtccaaatggctcttcttgtttttctgtgcttgtcaaaacacttttaatttgtaaaaaacgctgcgtatcagctagaatttcagcttctcttttttgaacttcctctttccaattaattgccgtcatctgtttgtctccttttcctgcttttacagattgtatctatcgttactattggtaaatttaactttatcatacctttatatagaaagaaataattgtctctttcctttcatatcaaaggtttacagagtcaaaattccgggaaataaattgtaggcacaatcgataaaaacggattctatttgtttattgtttacatatactataaaaaatgtgcaaatagaggaaggagatgttacgaaaggattacatatttatatcattttttgtaaatattgtgttaatttgcgttttctcttttatttttctgtcgattttgtgtacaataaggataaggactgaaatagtgcttgacatctcagagttataaagaagttgtgccttacgaaaaacgaataaggaagtggttttttgaaaccttcaactaatcgaatgctaactcgtatcaaatcggtctatatgttcatttgtaaaaatggaacagttacaacgcaagagcttgtagacgaatttggtattacaccaagaaccattcagcgtgacttgaatgtgttagcatataatgatttagttcgcagcccaagtcgcggtacatggacgactacgcaaaagaaggtcaagatgtcatcctagtaagtttatttcaagggtagtaagtgatttatatatagagataaaattctacgcagtagaaagtcaagacttggacgagtgcatagtcccccgctccatttgcacgtcaagcagagttggtactcgtttaagtgctttaacgtgaaatgtttcacttgtctaacaaagtggacaaaaaaaggaaccattttagacttaggttcctttttctttcgcctcttcttaggcatttgatttttgcaataaagctagttcttcttccgttaactccctatactctcctaaatctaatgactcgtctaacagcaaagctcccatagataaacgttttaaatacgttactttttttcctcttgcttcaaacatacgcttcacttgatgaaattttccttcaacgatcgttaattcaatttctgattccacaccgcttgttagtatctttaactctgctgattttgttacatatccatcatcaagagtgacaccttgtctaaatgcttcagcatcttcttcagtcaccggtgcattaatttttgcaaaatatgttttaggaacgtgttttttaggagatagcagctgatgtgcaagctgaccgtcattcgtcagcagcaagagcccttctgtatctttatctaaacgccctaccggaaatgggtcatacacagcatcgtcaagttcaagtaagtccaaaactgtttcatgaagagaatcttctgttgctgatatgacgccttgaggcttatgaagcataaagtaaacaaattctcggtaagaaacggcttcgccatgcacagtgatttcttgttcatctggattaacgtggaccttagcatctttaactgctgaaccgtctaccttaacagctccagtctttaaaagacctttaacttcttttcggcttccgtacccaatggtagaaagcaatttatccaaacgcatgtaatatcctcctcttttttgaaaagaagatgactctaacgagtcatcttcttacttaggcactgcgctgtttatttcggcgcagtatctttctttcaattgcaccagttaccctcgctcccattactttttcaagcaggcttgaacgataggtaataataaagtaaataaggccgcctactgctgctcctataattgtaataacagtggcagagaatcgtcctggcgttgtaaacagaccaatcactgctgcgacaatttttacgctgattcccataatcgcaacaaaaatgagaataagcacagagcgttttataaactcactgtagttatattttgcgtgtttttgaataagcacaaacatataaacaagagatacgatatagcctagtgcagtcgctaaaactgaaccaatctcgtggaacataagaataaatggaacgttcacgacaattttcacaatcaatccaaataatagacttaaaacagcatatttttgtttgttgattccttgtaaaatagctccattcaccgtaaaaaatgagaacaataaagctaccggtgcatagtaaagcaagacatttccacccgcatccgatgcatctgttccaaagaaaaacgtataggctgggccagctaaagccattaatcctacagatgctggcagcacaagaaacataatcgtttgatatgtttggtcaatttgcttttgcagtacgttataatctttattcacaaaggaacgtgtaatcgttggtacaagagtcaaaccgaacgcagtagctaatgaaacgggaatcatcacaagctttggaacataagactgaacaattccgttcattgactctgctatttctttttgtccagccgctaccattgcacggttaaatgtgaattggtccacatattgataaagcggaatagccaagctgacaaagacatatggcaatgaatacgtaagcagctctttaaaaatggatacggtagaaatacgcgtaggcgttaccgtctgctcgttcaccattttatcaagataaggctttcgttttttccagtaccaaattaatacagccagtccagcaagagctcctacaaaagcccccatcgtagcaaatccaacggctaatgcaagacttccatggacaactttgatgacgatataggtagatgccaataaaaagacaacccgcacaagctgttcaactacttgtgaaacagctgttggtcccatagactggtgaccttggaaaaatcctcgcattaaactcatcatcggtactacaattaacgcaacactaaccattcgcataaccattactacatcttctaaggagttatttaaatcagaacctcccagtgtaattctagacataacaggagctaacgaatataaaagtaaaaatgcaagtattcctgtgacaagcattaatttcatgccggcccgatacattcttctactcgtatagtaatcaccgagtgcattatattttgatacaaatttcgatacggccattggcataccggctgtagcaatacttaaataaatagcatattggttatatccgtaaccaaacagtgctccccctacggttccaacaaggatcgcaaatggaaataaataaatcattcccaagattcgggatacataagtgccaagcgttagcacaaaggtccctcttaacaattttgaatcagacatacgtttgcctccgatacttaatgttacatactgataataatgatagaattgaaaagaagcaagtgacagtatacactaagaaaggtcttatactcactcgcactcgtcaacaaactaaaaaaacaaagactatagcccattttatccaatgttgagagatttgtcagtgaacaaactaaatttttttaagaatagacaggttggtgaaagtatgatatatgatgtagtcgtaatcggaggaggaccttctggtttgatggcatcgattgcagctggtgagtcaggtgcaaacgtattattaattgataaaggcaataaacttggacgaaagcttgccatttctggaggcggacgctgtaatgtgacaaaccgtcttcccatcgatgaacttattaaacacattccaggaaacggacgctttttatacagtgcgttttctgtttttaataacgaagatatcatctcttattttgaaggccttggaattaaattaaaagaagaagatcacggccgtatgtttccggtcagcaataaagcgcaatctgttgttgacgcattaattagcgaacttcaccgtcttcgtgtgacaattcgcacaaacacagccgttaaacgcgtacactatgagaacaacaccgtgaaagaagttgtgcttcaaaacggggaagcaatccaaacaaaaagcgttgtgattgcagtaggtggaaaatcagtacctcatacaggttccacaggagacggttatcaatgggcaaaagatgcggggcataaaattactgaactttacccaacagaagttcctattacatctagcgaacactttattaaaaccaaaacgcttcaaggtctatcgcttcgcaatgtaggactaagcgtgcttaataaaaaaggcaagcctgtcattactcatcaaatggatatgattttcactcactttggcatctctggccctgccgctcttcgctgcagccaatatgttgttaaagagttaaagaaacaaaaaagcaatactgttcaaatgtctcttgatttatttcctagccaaaacgacgaagatattttccaaaaattagtcaaaacaacaaaagaagagccgaaaaaagcaattaaaaatgtcttaaaaggttttgtatctgaacgctatctattgtttttactcgagcaagcaagcattgatagccaagcgctagcaggacagcttcagcatgagaaactgagagaatttgcaagactgtgcaaacgatttgaatttgctgtaaacggcacgctttctttagaaaaagcattcgtcacaggaggcggcgtatctgttaaagaaattcacccaaaagaaatgtcttcgaaatttatgcaaggcctttacttctgcggggaaattcttgatatccatggatacactggaggatataatatcacttctgctcttgtaacaggccgtttggctggaagtaatgcaggagaatttgcaacaagcctagcataatatgctaggctttatacataaccatggctgaaaaacagtacacctgctcatcacgatcaacatccactgtcacttggtatttaatatcaacgacgtcttcatcctctaatttccgtaaaaatcggttcaccgcaaattctaaatctttttcgtgctctttatcaaacattttcacttgtatcacagcttctaccaccttgtcctatcaaatttgtttcaatcagaatggactgtttctcttgatgatggtttttgtacggattttcaatctcttactacctctatttttatgagagcttttatagatttagtcatcatttgttttcctgctatcattttagtcggatggcagaagtgtcattcaaaaaagaggttgagacataacgaaatgaactcaatctaaagacgaacaaatgggatacatgagctgaaacgcttgtgacacggcagtcaatttcctttcaagacttcgctttccgcgggcggccggtgatcctcctcgcttgtgctcctggggggtctcaccttttccgcttttctcgcaggagtcttcgccttgccttccaatcagctgctagaggagaggaaacgaaacaaataaaacctatgttcaccctaacaaaaaaaatgaaccactaatcaaacatgttgatcaatggttcatttttcacttcagctaagatacttttgtcccagcctcttttttatttattaaccgtttttccttcccactctaacataccgccaaccatatttgttactttatatccttgttcttgaaggtagtaacatacgttttcactgcggcggcccgaacggcaaatgaaaatatattctttgtctttatcgaaataatccacattacctggaatatcattcatacgaatgtgtttagcagttggaatcattccttctgctacttcttcatcttcgcgcacatcaactaaatgaagttcttctccattttcaacgcgtttttgaagttcttcaggcgtaattacttttacttcttccatcttcgtcattcctctctattctttcattcagcttgctatcgctattgtagcaaattcaaatacctttatgccactaaataagaaaagcttaagcagcagcctgcctaagcccttccaatcgtagttaaaggtttgactaagcgcctgatgtcaacccggaaaggcggacatcaggcacttaggtctagaacagaacccctgactaaagagcagtcaggggttctgttctacatcaatacttaattagctacgatgtttactaatttaccaggcacagcaatcactttgcgcactgtcttaccttcaatgaactcttgaacatcttcattagccattgcaatatcttgaagctcttcacgagacgcctcagcaggtacgtttactttcgcacgtactttaccgttaatttgaacgacaatttccacttcatcatctacaagttttgcttcgtcaaacgcaggccaagcctcatacgaaattgtatcttcgtgacctagtttgctccataattcctcagtcgtatgaggacaaattggtgctaatagcttcacaaatccttctacgtattgctttggcagcacgtcaactttgtatgcatcattgatgaataccataagctgagagatacctgtattaaaacggaggccttcgtaatcttccgttacttttttcaccgtttggtgatacacgcgttcaagcgtagtgtcattgctttcttgaaccttgctgcttaattcaccgttatcgtcaacaagtaagcgccatacacgatctaagaaacggcgtgcaccatcaagcccttttgttgaccaggcgattgacgcatctaaaggccccatgaacatttcataaaggcgaagcgtatctgctccgtggctttctacgatctcgtctgggtttacaacgttaccttttgacttactcattttttcgttgttttctccaagaatcataccttggttaaacagtttttggaacggctcttttgttggaactacgccgatatcatataaaaacttatgccagaaacgagcatataataagtgaagaacagcgtgttcagctccaccgatataaatatcaaccggcaaccattcttttaatttatctgcatctgctaacgcttcactgtttgttggatcaatgtagcgtaagtaataccagcagctgcctgcccattgaggcattgtatttgtttcgcggcgcccttttttgcctgtttccggatctactacgttcacccagtcatcaatgtttgctaacggagattcacctgtgcctgacggtttaatttcagtcgtttttggtaacacaagcggaagctgatcttcaggaactgcagtcgttgtgccatcttcccagtgaataacaggaattggttcaccccagtagcgctgacgactgaataaccagtcacgcagacggtatgttacttgtttttcacctttttcatttgtttgaagccactgaatcatatttgaaattgcttcttctttatctaaaccatttaagaagtctgaattaacgtgctcgccgtcgcctgtataagcttcttttgaaacgtctccgcccgctactacttctttaatcggcagttcaaatttaacagcaaattcataatcacgctcatcatgagctggaacagccataattgcacctgtgccatagctcattaaaacatagtcagcaatccaaattggcattctctcgccgtttacagggttaattgcataagcaccagtgaatacgccagttttgtctttagctaagtctgtacgttctaaatcgcttttgcttttaatttgatctaaatacgcttctaccgcttctttttgttcggctgttgtaattttttctacaaacggatgttcaggtgctaaaacggcatacgttgctccaaatagcgtgtcaggacgcgttgtgaacacagtaaatgtgtccttgtatccatcgattgtgaagtgcacgtgagctccttcagagcggccaatccagttgcgctgcatttctttaatactttctggccaatcaagctcatctaaatcttctagtaaacgatctgcataagctgtgattttaagcatccactgcttcattggacgacgctcaaccggatgtcccccacgctcacttttgccgtcaataacttcttcgttcgcaagtactgttcctagagcaggacaccagttaacagctacttcatccacataagctaagccgtttttatatagctgtaagaaaatccactgtgtccatttgtagtagtttggatcagttgtattaatttctcgctcccaatcgtaagagaaacctaacgatttgatttgacgacggaaattattaatgttaagttcagtgaattcagccgggtcgtttcctgtatctaatgcatactgttcagcaggtagtccgaatgcatcccatcccatcggatgaagtacattgtatccttgcatacgcttcatacgagataaaatatccgttgctgtataaccttctggatgcccaacgtgtaaaccagcgccagatggataagggaacatatctaatgcgtaaaatttacgctttccttcatcttctgttgttctaaatgttttattttcttcccaaactttttgccatttttgttcgatcttttcatgattaaaagccatacataatcctccttgtacgctccagctgtatttaattaaactaaaaaacccctcatccctcaaacaaagggacgagaggttgaataaacttcccgcggtaccacccaaattagcacaattatgtactcactcattttccttaacgcggatagacggcaaatgttactttacttcacatttacaactccaaggtgagttcatgaacgctcgtttgctgactcgcaccacccgtcagctctcttagctcgcttcgttcactactattccttatcatagtttttacatcatactaccttgtattgtaaataatatgttcgtaaactgcaagttgttcaagggattttgtaaaagtttctgcaatgcagcactgctttgttgctaaatcctctctttcattcttatatatgaacaacttctcccaaaaacatacatccacggccaaacaaaaaagggattgagacataattaaatcaatccaatttaaagacgaacaaatgggataaatgcgctagtatgaatttcttggttacaccgctgttgatttccgtgcaagactttttccgctggcagccgatgagcctcctcgtttcttacactcatgcggggtctcacctacttcaggagtctttaccttgccctccactccgcagctagaagcacctaaacaaatgaaacctacgttcaccataaacatgaaaagatccgaacgattcatcgttcggatcttccttcaactaaaatacttttatcctagtccctattttctttagctgctattattaaatgccaaatccaaaagaaaacaggatgatcgcaagtacaagaccaacaagcggcacaatcaccgtcattgctgcaactgatccatacgcatctttatgagtttctccgcaaatagaattaattgttgttacgacataaccattatgaggcaaggaatctaatactccagaggaaatagctactacgcgatggagagcttctggatttacaccagcatctagatagtgaggtgctaaaattggcaaagcaatcgcctgacctcctgaagccgaacctgtcatccctgcgataacactcacggcaatagctcctccaatcaacggacttcctggaatatgcgtcatggcatctacagccactccaaacgcgggaacagccttagcaactcctccaaaacctacgacagccgctgtattcccaatagcaattaacgcacccagtgttccttctgaagctgcattccaaaatcctttaaaatgctttcggttcacaatataagtgacaatgatcccgcttaaaagtgcgacaatcagcgcagattgctgaagtggcttatgaagtgcaaaagaaataatgagcacgaccacaagcggaagcaaacttaataaaggattaggaagagactgattttccgttactactggatctttcttgcgtgatataaaacgctctccatttttaactgcttttgaaatcaagcgctttaaccaccagtagccgaatacagccatcactactgctacaactaaactaacttcccatcctgcatacggactagtctttaagtattcaattggaatccagttttggatttcaggcgatccagccgaggtcatcgtaaacgtaacggaaccgaatgctaaagcagcagggataaaccgcctcggcaaatcggcctgtttgaataagcttaaagccattggatagacagagaatgctactacaaacagactgactcctccgtatgtcaagaccgcacaggcaagtacaatcgccaacactgctcttttcattcctagtttactgacaatccagcgagaaacactatcagcagccccgctgtcttccatcacttttccaaagacggcgcccaataggaacattaaataccaagaagcaataaatcctgtgaaaccagacatgtaatttccaacaaaatttgcttctccttctttcaccagctgtggaaataaaggcattccgcttgttaacgcaacaactaaagcactgagcggacctgctataaataaattcatgcctctcatcgttaatacaatgagcagcaataatcctccaattaatccaatcatactaagcatgtttagccccccatgaagtcatataattagaaaacgcttacacatttacaggtatatactcctttctttgcttgtcacaacccttattatattattaaaggaatactgaagacattcctacgtttattaagcattcaaaaataaaaccatctctatttatttagagatggttaatgaacgctgacgtttttcttttaatttataatcgtatatccatgttgtacacatgctgaatagcaatagtccaattaataaatagcacagtgtagacatattaaacgcatcgaaaataacgcctccaaagagaggaccaatcattttacctgcagtagccatgctgttaactacaccttgataaaatccttcttttccagatggagccaaatgacttgcaacagccggaatggctggccaaacgaacatttctccaattgttaacacaaccattgctgttaagaactgcggaaatgttgtagcattcaccacgataacaaaagaagccacaaaaataaccgttccaattaggacctgtacttttaatgtttttgctactttttgaatgatgggtacaatcaaaggctgaccgactacaattaaaatcccgttaattgtccaaagcaaactgtagctagaaagaggtatattcagctcacgcgtatgcgtagcaatcgttgtttgccactgaacatacgccacccagcataagacataccccgtacataaaataagaagagcagtcagcttcgttttatgcccaatgctccctgcttcattaaggacattcgtttgtccaacggtaaccgaaatatgacgatatgaaaaaatagcaataagcagaaaaataacgtataaaattgtattagctaagaaaatatacgtaaatgaataagacgctacaatgccccctaccgcggcgccaatagctactcctgcattttgagcaacgtacatcgcattaaatgcttttcttccgccttgtggccaaacggaccctgccattgcatacatagatggaaacacaataccagatccaaaccctacaacaaccaagagaacaacgtatgtaggccaaccatggaaaaacacgagtcccactaatgcaataagagtaataataattcctgataaaatggatttatatcctccgattttgtcaaaaagcgttcctccaagcaaatttcctactacgcttgccgcagaattcagcataagaaccactcctgcgacggataacgactttcctaaatgttcatttatataaattgtattgagaggccataaaaatgaagctcccgttacgtttacaagcataccaataatcaaaaaccaaagtgatttgggcattgatctcccccctatctattcgaatgccaacgtacattctagtcttttcttaaagggttcgcaatgcttttacatatagacaatttatttgaaattcgctgactatttaaaaaggtgattccacatgacaatatcatgcaaaatcacctttttatcgcttatttttgcttcgaacgaaccggctgtgcacgcttgctgtttcgtgcttttaattcttttaccggatcaaaatcttttcctagctcaatgtcattgctgttgatcccgttttttgttttttgttccggattattttgatttgaacgcgttgccataaaatcctctccttaatgctgagttgtgatcaatttattttgcagctgctgaacttgcaggcgcatgcgatatagctgctctctttgctgtgcatttgcactgtgagaaaactcttcaatttctttataagcattttctaatttttcctgtgcttttgtatattcagtgtcgttataatgttcttgcttcatgccttcctgcaactgaccttgtccaaagcgaatagcatcttcacactgttgcataagttgatccactgcttgacgagttgtcattctctattcctcctattcgttcatttctgtcttattttgcgcaactttacttccctttacgacaagaagaacctgttaaatataagcatccttaaatttgtttggcactttttcacgtttttgatacaatttgttgatgtatattgcatgtaaaaaggaggttgctgatttgagtcagacaaacccatttccgtataaatctgaaaacaaacgttatcacacctggaattaccacttacgtaaccactttggccataaggtatttaaagtagccttagatggaggatttgattgtccaaacagagacggcacggtagctcacggcggctgtacgttttgcagtgctgctggctcaggggattttgctggaaacagagcggatgacctcgtgacacaatttaatgaaatcagtgaaaaaatgcatcataaatggaaagacggaaaatacgttgcttattttcaagcatttactaatactcatgctcctgtcgaggagcttcgtgaaaaatatgaagccgtcttaaagcttcccggagttgttgggctttctatcgccacgcgccctgactgtctccccgacgatgtggtggaatacttggctgaattaaatgaacgaacttatctatgggtagaacttggactgcaaactgttcatgaacgaacttcactgcttattaaccgggcacacgatcatcaatgctatgtagatggggtagcaaagcttcgaaaacacggtattcgcgtatgttctcacatcattaatggtttgcctttagaaacacctgatatgatgatggaaaccgtacgtgaagtagcaaaattagacgttcaaggaattaagattcatctgcttcatttactaaaaggaactcctatggtcaaacagtatgaaaagggccttgttgaatttctttcatttgaagaatacgtaaagcttgtatgtgatcagctcgaagtaatccctcctgagatgattgttcatcgtattacaggcgatggaccgatagacctcatggttggaccgatgtggagcgtaaataagtggagcgtattaaatgccattgatcaagagctccaacgtcgtcaaagctatcaaggaaaatattacgaaaaagagttgatggaaaatgaaaatagaacgtatcctgccttttgcccgcacattgctgactaatgctgtggcccaaggagatgtcgcgattgatgccacagcaggaaatggacatgatacattgttcttagctaacttagtcggagatacaggtcatgtatatggatttgatattcaacctcaagccattcaagcaactcaacagcgattgacagaacaccatgtagaaaacagagtaacacttatccaagaaagccacagcaatataaacttgcttcctcgttctatcaaaagacgagtcacgggcgctgtctttaatttaggttatttaccaggtggagataaagacattgtcaccacttctgaaacaacaatctctgcaattgagcagttacttgatttgctagcacctgaaggagtgattgtgctcgttatttatcatggacacgaacaagggaaacaagaaagagacgatttactaacgtatgtccaaaatcttgaccaaaaagacgttcacgttttacaatatcgtttcatgaatcagcaaaacaaccctcccttcatcattgctattgaaaaaagataagccgcatatggcttatctttttaacattcggtacaagcgtccgttgatatagaaaaagtagctgagggctccccccgcttttattaacctacgtgcattcacatgaacatgtttttgtgcccgcactttttgatccgacaaataaacgcccaagagtcctttatagataaagcagtgaaagtgataatccggcagttttttagcatattcgtctgcttttacgacaaaatgcaaaaagcgatccatcatttgctgataatgaggataataaaaacaaaagttcaaatctcctcctgctttatcttcttcttggtcaattaaataatcgagtaaaatatgtaagccttgaatataaggaaaatatcctgcttttattttctgcgtcatttcttccgtcatctcttcttgaaagctataagcaactaaacaaaaaattcctaacgttgaaccagagcacgctgaaaattcataccactccatttcaggaacactgtgccggtgagcatcgaaccaattctctaatcgtggaactctttccttgatttcaacatgcttatgtatttgcaaatcacaataataattagctagttctaataaatgtgaagagactatatggtaattacaagcttttcgcaaggactgctgacaagtctggacaagtccggctaagtatcctccgtcgtctttatccgctcgaaaacgatagtaatccccaagaggtgcatgaggagtcaacgcatctggcatcgattcatgtaaggcggcaaaatctttagggtctagcgaattgctgcggtcacataagttatctaagtaatcgctgattgtttggtaggcaacaataaatttcacgcattcaatcatgttttctttcgctaaaatcgataggataccgcctccttcacaatgaaaagtttttgtatcgatacttgccaatgcttgagtacgcaattctttattaggaatctcttttgctcgttcgcgccaatgattaagctcatgatgaacgacaggaaacacttctcgataaatttttctcattaatgaaataggatgagacggaatcttcatttattttcacctcaatttcttaccgcatttattaaatgtgaagatcgacaaaacttttcgcatatgtaaaaacgtattctctttcaggctcattaaagatttcgtgatacagctgagaccattctttgtagattttttcacttagctctatttcatcaaaccactgcctaacaatcagcttttcaataattttatcttctcctgcctgcatcacaagaagcgggacatcaggcaaacgatcgatatctttaaaagctaagttgacagcttggatcaattcccggtaccatcttacagaaacttttgtaacatacagtgagtcattttcatcttcatctcgaacttcttggtttcttgttgctttttcaacagtgagacctaaatcgaaaagtttgttcggcatgactttatttaaccctttagatagcatatctaaataagccggtacttgctcttttaatcctagacaaggagaggaaagaatcgcaccccatataggaaggttttttgtctggagcgtacgaataaccgccagtcctcccatactgtggcctaacaggaaaataggcaaatcatatttttgcgcttcacgtacccattcttccacttcatacacatattcatcaaaggataggatatgtcctcttcttcttgttgttaagccttggccaggaaggtctcccataattacgtgcattccaaccgaacgccacatctcaatcagccagcgatagcgtccgtgatgctccgctgctccatggaccatgacaataacgccttttggatttactgcttcccatttatgcatttgagttactccttcttcctttttttgtttacctgcttaaaaaacctttgtacacttacattagaagatttactactttttttcaactaataaagggagatgatttgatgatttatccgtataaagaaaaaatgcctaccattgcacccagctgcttcatcgcagactatgtcacgattactggagatgtcaccattggtgaagaaagcagcatttggtttaacactgttattagaggagatgtttcacctacgattattggtaaacgagtaaatatacaagatcaatcaacactccatcaaagtccaaatgctcctttgcttattgaggatgatgtaacagtaggacatcaagttattttacatagctccatcatccgcaaacgcgcgctcattggcatgggttctattattttagacggggcggaaattggtgaaggtgcttttatcggtgctggaagcttagtgcctcccggtaaaaaaataccccctaatactctcgcactcggccgacctgctaaagtgatccgcactctgacagaagaggatttaaaagatatgcagcgcattcgtacagaatatgtagaaaaagggcagtattataaatctattaagaaatctgattcttcattataaaggaaacgttccctcagaaagtcatactgagggaatttttttattatctccacaaactctccaatcatgctctattctctccacaattgtaaagaaatttccatattaatttacatcgttttagtactgcctacacaattaaagattaaactgaataataaagacgtatttattgaaaagggagcgactctatgaaagccaagttaattcagtatgtatatgatgccgaatgccgattattcaaaagcgtaaaccaacattttgatcgaaagcacttaaatagatttttacgtttactaactcacgctggcggagccacgtttaccattgtgatagcgtgcttactgctatttctgcatccttcatctgtcgcttacgcttgtgcgttttctctagccgttagtcatattcctgtcgccattgctaaaaaactatatccgagaaaacgaccttatattcaattaaaatatacaaaagtattagaaaatccattaaaagatcattcatttccatctgggcatacaacagctattttttcgttggttacccctcttatgattgtttatccagccttcactaccgttcttttgcctcttgcagtaacggtaggaatttcaagaatttatctcggtctgcactatccgacggatgtcatggtaggcctgatactgggcatcttttcaggtactgtgtcactgaacatatttttaacttaattgataggaggagtactaatgagaattgctttatttacggatacatttgctccagaagttaacggagctgctaaaacactttatcagtttacccagtatgtcaaatcaaagcaaattcccatccaggtatttgctcctgaatttgctcatgatcagtcattttcaacgtatgttcaccgttcgcccagcatgccgtttttcctttatccaaacagccgcttttcattgccaaacgttctaaaaattaaaaagcagctgcaggaattcaatccttctattattcatttggccactccttttacaatggggctttgcggctcctattacgggaaaagattaggtgttcctcttgtcggctcttatcataccaattttgatgattatttatctcactatgaacttgaaaaaatgcgtgtaccactgcaaaaatatatgaaatggttttataaacctgtacaaaaaatattcgctccctctgaagtgaccaaacagcagctagaagaacaagggtttcacaacgtatctatttggtcgcgaggagtaaatcataaattatttcatccccactatgaccgcttcgatattcgtattaaatataatattaaaaagccctacattttaacatatgtaggaagattagctaaagaaaagaacgctgattttttaataaaaattgcacgatctctacctgatcatatccgccatcaaattcactgggttattgtgggagacggccctttaaaagaacaaatgcaacagcaagcatctgagcatatgacatttacaggcttccttgaaggtaagcaacttgctcatatctattcatcatctgatttgtttgtttttccttcagaaacagaaaccttcggaaatgttgtactggagtctcttgcttctggaactcctgtagtggcagcaaatgcaggaggagttaaacagatggttcagcacgggcgaaacggctacctttgcaaacctcactccttagaagaattcagttcggctattacaggtttactcgatgatttgcaccagcggcttcactttggccatgcagcgagacactatgctcttactcaatcatgggacgccatttttcagcatttgctttcagaatatgaaggcgtcgtagaaaaatctgctgcaggtattcaatgggcataaaaaaaatctccgttttcacggagatttttttattatttagctaaagcttgagtttttaatgcttccgctttgtctgtgaactcccaaggaagctccacatccgtacgaccaaagtggccgtaagctgctgtttgcttataaattgggcgacgtaaatcaagcattttaatgatgcctgctggacgtaggtcaaagtttttgcgtactacgtctactagtacttcttcggaaacttttcctgtaccgaatgtatcaattgaaatagatactggttgcgcaacaccaatcgcatatgctagttgtacttcacatttatcagcaagatcagctgctacaatgtttttcgcaacataccgagctgcataagctgctgaacggtctacttttgttgcgtccttaccagagaatgcaccgccgccatgacgagcatatccgccgtaagtatcaacgataattttacgaccagttaaaccagcatctccttgaggaccgccgattacgaaacggcctgttgggttaatgaaatactttgtattttcatcaattaactcgtttggaacaactggattaataacatattcttttaagttacgttgaatttgctctaacgttacttctggatgatgctgagttgaaataacaattgtatcgatgcgaacaggtttgttgttttcatcatattcaactgttacttgtgttttaccatccgggcgaaggtaaggaagaatttcttctttacgtacttctgttagacggcgagcaagtttatgagctaatgaaattggaagaggcattaattcttttgtttcgttacatgcataaccaaacattaagccttggtctccagctccgattgcttcgatttcttcatctgacatttgaccttcacgtgcttctaacgcttggtctacaccagcagcgatatcagctgactgctcgtcgatagatgttaatactgcacaagtttcagcatcaaatccgtattttgcacgagtatagccaattcctttaattgtttcgcgaactgttttaggaatatctacgtaagtagaagttgtaatttcaccacttactaaaactaaaccagttgttacgcttgtttcacaagcaacacgagcatttggatcctttgctaggatagcatcaagaattgagtcagaaatttggtcacaaattttatcgggatgtccctctgtaacagattctgacgtgaacagacgacgttgtgttgacatcagttttcctccttataaatacgatacattgtgatacggtactcattcccttattttcattacacgctaaaaaatataaaaaaacctttccttgtatcgaggaaaggtatcaaattctacataagcctttcactcttatcgatcaaggttgtgcccttgcatcaggttagcaccttatcgtctacacaaaaaaatgacgatggttgctgggtttcatagggcctgtccctccaccagctcgggataagagagtatccgttcaaggacatataatacatgaaaaagcgcttcactgtcaacaacattcaaatggaaatcatctctttaggtttgaatctgttttaatgtaacatactcaaattccgaaatagtacaccttattaagaatcatcactaagtttagttaataagacagatcaaaatgaggctttcacttaaaatagcttcacttttttcgctcctagcacatatacaggtgtccaaaataggtataacgtacatttttttataatacacaaacatttttagttaaatagtatagaataattaaataaatgtgttatactaattataaatttcaaacattaatgaataaataatagctaaaaaaggaaggtagtgcacatgagtactgttgatatgtctatcgaattaaatggtttgcttcaattaaaaacaacaaaacaccaattatctgttccacaacttgttgaaaaaattctagctcgacgcgaaggaacgttgacttctacaggtgctgtgtcagtcgaaaccggaaaatatacaggtcgctctcctttagataaatttattgtaagcgatgctgtgtcttcaaaaacggttgaatggggacctgtcaatcagccaatttctgctcagcgattcgatgcgctatacaaaaaagtcttaaaccacttaaagaagcaggatgaactttttgtttttaatggatatgctggagctgataaaaagtatcagttaccaattcaagtagttaatgaatttgcatggcacaacctattcgctcagcagttattcattcgcccttcagccgaacaaaaaacaaatgatgatgtgaagccgtttacaattgtagcagctccaacgttcaaagctgatcctgaaacagacgggacgaattctgaaaccttcattattctttcgttagagcgacgtattgtgctaattggaggaactgaatacgctggtgaaatgaaaaaatctattttctcagtgatgaacttcttgcttcctcaaaacaatattctatccatgcactgttctgccaacgtaggagaagaaggtgacgttgcattattctttggtttatctggaacgggtaaaacaacgctttctgctgatgcaaaccgtcgtttaatcggagatgatgagcacggttggtcaagctctggtgtatttaatattgaaggaggatgctacgcgaagtgcattcagctttccgaagaaaaagaaccgcaaattttcaatgcaattcgcttcggcgccgtactggaaaatgtagtgttaaatcaaaatacgaaagtagcagattacaatgataatagtttaacagagaatactcgtgccgcttattcaattgactctattgataatacggtattgccaagcgttgctgggcaccctacagctattgtctttttaactgctgatgctttcggcgtcttgcctccaatcagcaagcttacaaaagaacaagcgatgtaccattttctgagcggatacactagtaagttagctggaacagagcgcggcgtaacatcgccacaggctactttctctacatgctttggtgagcctttcttacctcttgctccaacaacttatgcagaaatgctaggaaagaaaatcgatgaacataatgtaaatgtctaccttgtaaatactggatggaccggtggtgaatacggcatcggcgaacgaatgaagttaagttacactcgagctatggttcaagcagcccttgaaggagaactagctaataccgaaacagtaacagacgctatttttggtttatcgattccaactcatgttccgggagttcctgatgaagtgcttcagccttctaaagcatggaacgatgcaacagcttataatcaaaaagcaactgagcttgctgctaaattcaaagctaatttcaagcgttttaatgatgtggcatctgatatttcaacattaggcggacctagggtctaataaaaaaccgatcgtcttagagacgatcggttttttagttagtcgaatgtaattttgtcagttcatatgtgacaatggttttttcctgctccatttctaccttacgcacaacagcagttccaatacattctccagttttcgttttgtgaatgtttaatggaatatctaacggatacaagcgatatccttttttctcaatttgaaaaatgttatccgttacacgtttttcattgccttttgtcacaatcattgtatttaattctagcggcatccccattttttctcactcctcactgttattctacttgttttctctatcgtagcatatcttttattgcgctttcatccacttcgttaacttcttcaccgtttctcggttttcttttggtggaaaagcatgtggaaagttttcgaagtaccagctggtaacttttttattggacttctttaatttagattcgagctgataagaatgatcaatcgatacgtttttatcttctaaaccatgaataagcaagaccggcggcttgacgagatgagcacgatgcaaaggtgtcctccattcatatctttcaggatatttagaaggagttcctccaatcactcgcttcatcattcttcttaaatcttctctttcttcatatgtcagcaccatatccgtgacgcctccccataacacaagagagcggctgtcgtttttttcaatggctgtgagtaaagccatcactccccctcttgaaaacccaaaaatatgaatgcggtcacggtggacgttagggagctgtttcaataaatcgtaagcagcaaaagcatcgtaacgatcatctcctgcaaaatcttcgtttccttcgcctccttgatttcccctatagaacggagccatcacaataaaaccttgagaagcaaattgaatgagtcgagcaggacgaaccgttcctacgttcttaatacctcctcttaagtataaaaagccgtcatacattcctttttcttttggctctgcgagcattcctttaatcttgagcccttgacatgcatatgtaatcacccacagcgccacgcgagggtttgatgatgggaaacgctgtttatgaagaattgttccatctttcatttttttcctccattctttatatgactggtatattttttcccgccacggtggactttcaatcgttggctaatacttctttgattttccacatagttatgtaagcactcaccttcttctactttcttacatacattatcataaaatattttattcttttaaggaggtttgctttatgaaaccaatcaaatggctcttttctttgcttgctattatgattttactcatcccaataattagctgcggcaaaacaacatctgtacagacggttcgtgtcggcgaagtaactcgctctatcttttatgctccccagtacgttgctatttcaaaaggcttttttgaagaagaaggactaaaggtagatttaaaaacaacgtggggcggagataagacaatgacgtcacttttatctgacggcatcgacgtcgccttagtcggctcggaaacttcaatctacgtatatgcacaggggtctagtgatcccgtcatcaactttgcacaactaacccaaaccgacggaacatttctagtatcgcgtaaaaaggtcgatcaattctcatgggatcagcttaaaggcaaaacgtttcttggtcaacgtaaaggcggcatgccgcaaatggtaggggaatatgtgttgaaacagcataatattgatcctaaaaaagatgtaaaactcgttcaaaacattgattttgctaatgttgcgaatgcttttgcttctggtactggagattatgttcaattatttgagccaacggctagtattttagagcaacaaggaaaaggacatatcgttgcttccttcggaaaagaatcaggaacagttccttatacaacatttatggccaaagaaagctatttaaaagataaccctgaagcagcggctaaatttactcgagctatttacaaagcacaaaaatgggtgaatacacatagcacagatgaaattgccgaagtggttgcaccgtatttcgaagatactcctaaagaaacgctgaaaactgttattgaccgctataaatctcaaaaatcctttgcaactaaccctttattagatcaaaaagagtgggatcatttacaaaaaatcatggacgaatctggagaacttccaagacacatcgattacaacaagctagtcaacacaaaattcgcaaaagatgcaatgagtgagtaatatgacaaaacttcacattcaagatgttcagcatatgtatcttacgacaaagtctgctaccactgcacttgaacatattaatttgtctattgaagaaggagaatttgtttcctttctcggcccaagcggatgtggaaaaacgacgcttctatcgattattgcaggcttgattgaaccaacgtccggctttgtcacaatagacggtgaaaatatcggaacatcagtcccaaacatcggttatatgcttcaacaagattatttgtttccgtggaaaaccattaaagaaaatattttacttgggcttgaaattcgcggacagctaacagataaaacagagagtaaagcactgttactcctaaaagaaattggtttacagggcgtaggtgacctatatccgcatcagttatccggaggcatgagacagcgtgtcgctttagtccgaacacttgccattgaccccgctattttactcttagatgaacctttttcagcacttgattttcaaacaaaacttaagcttgaagaacttgtctccaaaacgctgatgacctatcaaaaaacggccgttttggtcacgcatgatatcggcgaagctattgccatgagcagccgaatctttttattctcagcaaaaccgggaaaaatcgcaaaaacatttacggttccttctattttacgaactctctctccgtttgaagcacgacagcatcctgtctataacgatttatttatggacatatggaaggagcttgatcaacttgaaacccactagctccctagatactcttcacgaaagctaccttcgcaaggttcggggtgaaaaacgattagtactgagcgtacagctggtcatgttcttagccttttttagcttctgggaactggcttctcgtttaaagtggattgaccctttaattttcagttcccctactaaagtatggcatttatttttaattaaacttaccgacggctcgctggcagcgcatattggttttacattatttgaaacgattcttggcttcattttaggcacattactaggtattttacttgcaacggccctttggtattcaacgaggcttgcaaacatattagacccttacctcgttattttaaacgccatgccaaaagtagcgctgggccctattttaattgtagcgatcggtccaggatttttctcaatcttaacgatgggggcgattatatccgttattattacatccatcgtcgtttacacagcatttaaagaagttgatccaaactatattaaattactaaaaagctttggggcaacgaaaacccgctgttttaaagaagccattttgccagcttccatgcccgctattatttccacatttaaagtaaatgtcggcttatcttgggtaggagtcatcgtaggagaatttttagtttcttcgaaagggcttggatatatgattatttatggtttccaagtcttcaactttactcttgttcttctcagcttattattaattgccattttcgctacgattatgtatcaaggcgttgcttatttagaaaagaaattgatccgacgctcataaaaaatccccccgtacaaacggggggattttcattgataggacacttttacaaaaatgttcgctttacatatttcattacatattgtaaaacattatctttcatgatgaagctgtatgcatcatcttgttgaatgcccgaaggtaattcatcaatcattacgggaccatccgtttccatgtagtcttcttttttaattacatttccaatagtagcaaaataaatgtttttaataatggtctttcctttacttactactttatattgcccaatataagttaaagaagagacttctccgcctgtttcttcaaatacttctcgaaccgctgcttcttctggtacttcattgccttctagttttcctccgggaaattctaaacctcgttttgagtgattcgttagcaaccattgattttcatacctgcatacgacccaaacatgacgtggagttttcgagaatggatttttttcaaatgataaaaatacttgattatgatatgcatccttaaatgtgtacatggtcgactcaaactccatttgatttttcccttattttatcatacattacggccatacctgataagaaaagtatgctcgtactttttttgtttgctttttactccttattccattctatctgaagataaaatattcatctgtttgatatgtgattttgtttcatcgtctcctagctgataaagcatggcatatatttcaactgtcgttttatcgtacatatcattttgagaatcatgatgatattccagatacggaatatgtgatcgccaaaagcttgaccaatcgcttgaagcacgctgatctaaatacgttctcagcttctcgacttcttcatctgttgcttcaatcgcataattccaatctgaagcagtatttgactgattgatttctcctgaactcagagatatataatatttttttgtcatgaaagatattcagctccttctttctagtgccaacttatctttcttatttgtatcttattctttttttatacactttacgatttaaagcggtcttttaaaatcgctattgctttttttagcggctctggaattggaattcctacaattcctgcattttctgtaattgaaatcatttcgtttaaaatatagaacaaagtagctccatctcgaataatatgaccgttttcccagaatacggaatcgataaagtttgctacagcaatcatggcaaaaataaaaatctttttggcaattcctttaaaacctactttgctagataaacgtttatttataaaagctgcaatcgtgcctgtcaaataatccattgtcactaatgctgctaaagccattagtaaatagtcccactctccaaataaaaaaaaagccagtgaacctaaacttgagattatcaagacagaaagcttctgcatatccacttttttcaccctttcagcagtcatatctctacagtatatgccggtgaaaaaaaagtgttcgtccatcttaccataaaaaaacctgcgattactcgcaggttaattacttgcctaggaatgattttaacatccacgtatgcttttctaagctttgatgaatggctaacagcatgtctcctgttgtttcgtcgcccgcttcaccggctgcgtccattccttcttttaattcagcagttagcgtatcaaaatcgcttactaaagaagcgaccatatctttagccgtttcgcttccatccgcttctttaatagaagaaagttctaacgattctttcattgttgccacaggttttccttctaatgctaaaaggcgttctgcaaggtcatcaataattgtagctgtttccgtatacagctcttcaaacttttcatgaagagtgaagaattgttcaccttttacgtaccagtgaaagttatgaagttttatgtacattacactaaaattcgctacttgtttattaacgatttcatttacatttactgccatgtttttcgctcctttgtgaagtctttgtataatatagttgtacccttttttagttcattaaaacatttttttcataaaaagagacatttccctttctttagacttagagaaacttcttcatcttttttcaaataaaataagcagcccagcggactgcttatttttagccaaatactttttctaaatcttctttgtcctgttctagccagaacttcatcaagcgttttgctccttctaaatcgtgaagtttcgcttgaccgcactgcttttcgtttgctgctggaatttcagtaatgttaattgcatcttttaacgtatcgtctaacaaatcaataatttcacgtacagtcggctcaccgctcactactaagtagtaccctgtttgacatcccataggcgaaatatcaataatatcaaagtgatcgtatttttctacatgagtacgaatattaaaagctaataaatgctctagcgtatgaataacgtccggcttcattgcttgtttgtttggctggcaaaaacgaatatcaaatttatttacaacgccgtcgcttcccactttgtgaacaccgcagtgtcttacgtaaggtgctttaaccgcattatgatctagctcaaaactttctactgatggcataataccactccttttttcttctttcacctatcataacatgcaattccgatatatttcatccatttaataacctttatttcttttagttgctttttattccttctatcccttatagtatgagcaaacacgaaagaaagaacgtgataataaatgattgcaaagcttttgcttttacttataaaaggatatcaaaaaggaatttcaccttttcttccggcaaggtgccggttttaccctacttgctcccagtacggagttgaatccattaaacgctttggtgccgtaaagggatcttatttgactgtaaaacgcattttaaaatgccacccgttccatccgggtggcatcgatgaagtacctgagaaaaaatcacactaagctttagttgttttcgattgcttcatacccatttacaacaacatctagctttcctgtatttggatcaataactagtccatgtacaggagtatcttttgaaaatagaggatgattacggattgtctctacactatgctgaacagtctcttctactgaatcaaaacccgttaaccattgtttcaagtccatagaatattcaatagtattaatcacttcatctgagatgccttttgctcttactttctctaaaaaaggttccgcttgaagtttacctgctccacagtcgtggtgaccaattacacatacctcatctgcttgaagctcgtacacagctactaaaatgcttctcataatacttccaaatggatgtgaaacaagcgctcctgcgtttttaacaattttcacgtctccgttgcgcaaattcaaagcgtgtggaagtaattctaccaatcttgtgtccatacacgataaaataaccatttttttatcagggaatttgcttgtttcgtaaagttcatacttcttttcttctacaaatttttggttgaattctaaaacatcttgtaataagctcatctgctgtcttctccttcataaaaaaaattctttcttgtattataatactttttcctataagatgaaaagtgttaaatcgtaatcattattatttataaacaagaaagtaggttataacagtgaaaaaaattcccgttaccgttttaagcggataccttggttcaggtaaaacaactcttttgaaccatattttaaaaaataaagaaggtttaaaggtcgcggtcattgtcaatgacatgagcgaagtaaatattgatgcagacttagttaaacaaagcggattctctcgaacagaagaaaaacttgttaaaatgcaaaatggctgtatttgctgtacgcttcgagacgacctaatgacagaggtagaacgcctagcagacaatggtgatattgattatattgtcattgaatcttccggaatcagcgaacctatccctgttgctcaaacatttacttatattgatgaagagcttggcattgatttaactcagaaatgttcgttagatacgatggtcactgtagtagatgccaatcgcttttgggaagacttttcatccggcgaaagcttattagaccgcaaagaaggaacggatgaaaacgatacaagagaagtgattgatttgttaatcgatcaaattgaatttgcaaacgtcattttgttaaacaaagttgatttgttaacaaaagatgatgcagatgagctgcaggctgttcttcacaaattaaactcagaagccactgttatccaaacaattaatagtgacgtaagccttgaagccatacttcataccgacttattcgactttgaaaaagctagtcaaggagccggatggattaaagaattaaatgaggagcaccatacgcctgaaacggaagagttcggtatttcttcttttgtatacagaaggaatcgtccccttcatcctgaacgctttatgaaatggttagagaactggccggttgatattgtacgtgcaaagggatttttctggcttgcttcgcgtaataatatggcaggacttctttctcaagccggtacgtccattatgattcaagcagcgggtgaatggatagcaacttacgaaccggaagaaagagaacaaaccttaaaagaagagcctgaattacgagcaaaatgggatgaacaatttggagatcgtattaacgagcttgtgttcattggtattgatatgaacaaagctgaaataattgaaactttagaccgctgtttgctgacaaatgaggaaatgaatcaagattgggctactctcaaagatccccttcctaaatttacagtaagtgcgtaaatttttagttttcaaatcgtaataattacgatataataacataggtcataaatggttacgatacgaacggaaggagcaacataatgaaattcaaaccacttttaatggtgcttgcattaggaattggaacagctcttgcagggtgcagttcaagcagtgcaaataacgcatctgataataaaaacaaaaaattagaagtttatacaacaatctaccctttacaggactttactgaaaaaatcggtggaaaatatgtagaagctaaaagcattttaccaaccggtgtagacgcgcactcatttgagcctacaacaaaaacaatggtcaaaatcgccaacgcggacgcatttgtttactcaggaattggacttgaaggttttgcagataaagcacagtctacacttaaaaatgaagatgtagctttagtagaagctgcaaaaggaattaaattagcaaagagttctgaagatgagcatgcccacgaagacgaacatgcccatgaagaagagcataaccacggagatacagaccctcacgtttggcttgatcctgttttagctattcaattagcagaaaatattaaagacgaacttattgaattaaaaccagataaaaaagcagagtttgaaaagaacttccaatcgttaaagactcagcttgaagatgtggaccaagagttaaaaacaacgattggcgacgcacctcataaagaaattttagtatcacatgcagcctatggctactgggaaaaacgatacggcttaaaacaaattagcgtagcgggtttatctcctacaaatgagccttctcagaaacaattagaaaacatcgtaaaacaggcaaaaaaagaccatatcaaatactttatctttgaccaaaatttaaagcctaaagtgtctacgcttgtaaaaaatgaagtaggagctcaagctttaacacttcataacttagagtcattaacaaaaaacgatgttaaaaataaagaagattatttctccattatgcaacacaacattgatacgttgaaaaaagcattatattaataaaaaaactagcctcccggctagtttttttattgtaatttatatttttgcttaaagcgttctacacggccgcctttatcagcaaatttttgctttcctgtataaaatggatgtgtatccgaactgatttcaacttttaaaagcggatatgtgttgccatcttcccattgaacggtctcatttgattgttttgtagatcctgataaaaatgatgttccgctatttgtatccatgaatacaactttacgatagtctggatgaatatttgttttcattaaatatctctcctttaaaacaatatatacttattataatcgtaatgattactattttcaagttatatgttttaccaattctgatgcataaagcgtggtaaaaagtggacaataaggtttatcaatactttactggaaaggttgaaaaatgaatggatcatttagttactgcacgttcaatgtttggtctgaacatgggagtacatatcatttttgccactcttggcgtcggcattcctctcatgattttattggctgaaattctttactacaaaacaaaagataaagattatgaacttatggcacagcgttggacaaaaggagctgctgtcctgcttggagtcgccattcctacgggaacgattgctggtgtacaattagcgttgctttggccgggttttatggaaatcgtaggaaaagtgatggctcttccctttcaaattgaaatttatgctttctttattgaggctctgtttctctctatttatgtatacgcagcggaccgtatttctcgaaaaatgaggattatcagtctaattttagtagcaataggcgctcttgcctctgccgttttaattaccaatgtgcacgcatttgaaggaacacctgctggctttcgaattttaaatggagacattgtaagcgtagatccttgggcagctttctttaatccgagcttctttgtaacgtccggtcacgtagcggtttctgcttatacaaccggaggcttcgtcattgcttcagtcgctgcctttaaaatgcttcgtgcgcgaaaacataatccaagagaatataagtttcatcataaagcgttgatgatggggttagtaatcggcgggattttctcttttgtaacggctttgaatggacatgaatctatgcaaaaagtatacgaatatcaacccgaaaaacttgcagcagctgaaggtctatttgaaacgcaagatcatgcgccattagctttaggcggattcacagatgaaaaagaacagcgagtcaagtatggaattgagtttccatggatgctcagcttcttgtcgggtaatagctttaatacagtgattactggactcaatgacttccctagggattattggccgccgctttttgtgcataccttgtttaacggtatggtcattatcggatcgattttaattttagtggcgctagtgggcgttgtttggtacaagtttttaaagaagaaaagcttccctaaaattttcatgtgggcatttgtcgcaacgggccctctcgcgatcatgggcattgaattcggatggattttcgcatgtaccggaagacagccctgggtcatttaccgcatcatgcgtacatcagaagcagttaccacttctgctaatttgcatattttattttttttatttttgcttgtttatatcgtactcgtggccgcagtcgcccttgtactggtgttttattttagaagaaatccgctttctaaagagcttgctgcgcaagcagattaaaaaggatgtgagaatatgggtgattcattactagcaattactgtaatatggggcttcatttttatctatgccgtaatgggaacgatggactttggagctggcttttggtcgatggtatatattaatcgtacgaaaacaaatgctacagatgtagcaaacagatatctatcgcctacttgggaagtaaccaatgtatttatcgttgcgattgttgttgcgctgtttagtttttttcctcgagctacatttacgcttggcacagtgttactaatacccggaagtatcattttacttctcttatctattcgaagcggatttttagtgttttcacactatgctagcagcttcaaatatcggagagcgttggtttatatatccggtatatccggcgtgttaattcctgcttttttaatcgctgtactgccagtaagtcaaggtggatttattgatataatagatggcacgcagcaattaaatttagcaaaagtattttcaagtccgcacgtctattcatttatcggatttgccataagctcttcgctgtttctatcgtctctgttattagcagattactcgaagtcatctgacgaaatggaagcttatgcggtctatcggcgtgatgcgctcattacaggacctctttccctgctaatggctatctttattatgattacaatgcaatcagaagcaagctggttatatgataaaatgatgcagtttaagccccttctttacggatctgtaggtctatttgtagtagctggtattgctctgctgctaccttctcaaaaaggaaaaggcatgcctcgtttagccgtggtatccattatccttcaatatttcttagcaagttacgtatacggacgaagtcatttaccttatgttgtctatccaaacgtaacgattgagaatggatttacacatcccgatgcgtttcattctttatttattgtgtatattgttggttttgctattttatttcctggattcttttatttctggcgtctatttatgaaagataataaagaatacagcaaaaagaagccatattaaaaaacccggtcagcacttgaccgggttttcttatgaagcagcagattttgctactacttgagcaaaacctttagcaaatatcttacatttttctatatcttctccaaagggagagagctcgattttcaaaccgggaacggctatatttccattacgtctctttattttttcttcaattaaatcaactgctccgcaaaaaacatcatatgatgaatcacctgagccaaatacagccatctgcttttgactgagatctatatcatccatttcatcataaagatctaaaaaatcatctggcagctctccatctccccacgtataagctccaaagataatagattctgcggatacaaggtcagaagcatcaatgtcatatacttctgctcgtttcacatgtaatccatgcttgactaattcttcttcgatcaaatcggctatcgcttctgtgttacctgacatactcgcataagctagtaagatttccttcatgtatatgacgctcctttacaccagcagtgtcggccgcatatccccttcttcaacgcattctcgttgaagaggacagttttcacactcactggatgcataattcttttgaaaatgttttggttccattaacacacttttgacaatatgtagttgaagtatggatttttgataatcggctggtgcaatatgataagttgttgtttctccagttaataatgaataaaaacgaatttgttcaggaacctttttaaaagcttgtttcgaaaaaacgataataaagtctttcatggcgtttttcacttcttcatggtcatctagaatgaattttgttaccgtataagacttctctgtccatgcagcaaaatcaatggttagagaaaggttgctttgaatttcttctacataaacgctgtatttctcaaacacaaaaagcggtaattccatatgtgctttctttcctaaaaaccttagtaaataatcacttactttagctaacacatcgtaatagtgaacgggtgatgaaaacatatttggctttagacgccaatatttttcaataagctgtaaaacatagaggtttgagcgatactcaactggcttgctatagtatgttttaatgatttgatggacagttacttgaacgagctgtttccaatctatagatgtttttttcaaaagaagctgctgctgataaaatttgtacggacatcgaataaattgttcgatgtggtcgttagagagtgtctttatatgcacttttatcggttccacctatgtctcaccaccctaattgaaattcattctcaataataaataaaaattaaatcatgaaatttgctcaatcactttacgaatagcactccatgaatgtttgacgaaataaatcggttttttttgtttttttgctttctctttaatgacttttgccatattgtgattaataaaatccgtaataactaatacaaacccaatatgttcgggtatttctcgcttcaccatattgcttttacggccatctaaatgaattacttcattaaatccttctccctctaaacgatctgtaatatgctttaacctgtctcctcctacaaccataactgatgacatgtttgttccctcccaattaattattcatttaatgatttgccaacaacttgtattctttactatatacacagtttaattgagaatgattatctttgtcaatgtttaattgataaaaattctcaattaaaatgaaagtctaccacctttcttataagttagttgaattttgaccatactatagctatcacatacaaaggagggttaacgttggaacaaaacattctttgtgaagtaaataactgtcacttttggaaaaatggaaatcactgcagcgcagaagaaatttacgtggtaagtcatagcggaaaacatgcagcaagcagttatgaaacagactgtaaaacgttcaagccaactgaagcgtaacccgcaaaaggacagcctctgggttgtcttttttctctcttcaagatcataaaaaaggagactattatgaaaactgaacaactgattcatttttttaaagaagaagcaataaaagcaaatgaacaaacctttccaatctatgtacaatcttttactcatttatggacatataaatggggaacacttgaaaacattccagaagaaattgatgacttaattaccacacgtgcgttagaacttggacttattcacttaaaaaaagctgactaatcaataaggaaattagtcagctcttgtatttatagatcatcaaatccattcgcatctgatgcttttgtatattgtcttgatttctgttcaaagaaatccgttttccctaaatctacctcttgataagcaataatccaacgaagaggattttcaatcggtgcttctgggaaagcagctcggccaaagcctaattgattacagcgtttattagccatgtattcaatatactgctgcagttctttcatcgtgatcccgtcgaatttttctccgataacagattctgcccattcaatttcaagacgagctgcctcttggaacgtttcaactacaaatgtttctagctcctccgtacgataagctggattttcatttaggacttccttgaaaatcttttcaaataacccaacgtgaagctgttcatcacgattgatatagttaatcatcgtagatgtcgccaccatcttttgatttctcgcaagattatagaagaaagcaaatccgctatagaagaaaaggccttctaaaataacatcatataccatagacttcaaaaagttttcaaccgttgcttcttcgctaaatgctttatatccgtttgtaataaagtcatttcgagcacgaagcttttcgtctgtgcgccagtattcaaatacttcatcttgttttccttttggtacaagacttgataaaacatatgaatacgaatgattatgaaccacttcttgctgcgctaaaataatcattagagcattaatcgaagagtcggttacataatcagctactttgctagcataatctgattgaatactgtccagtagcgccagcaggccaataatttttaaaaagctctcttgttcgtcagccgttaaccgagggaactgcttaatatcttgacccatattaatttcaaacggcgtccagaagttagctagcatacgcttgtatttagggaacgcccatgaaaatcggacgtcatcccagtttagaatatttgagctcttgccgttgatgattcctgtcgaacggttcggagctgtttcgttcattaattctcgttttaacatgcttgtcattaattattcactccttttaactatgacagctttcacattcttcaatcacttcacttgatgttgaacgtacgtagtaggtcgtttttaacttttctttccatgccgtcatatgaagatccagcagctcttttgctcggatatcattttgtacatataagttgaatgaaatggattgatcaatatggcgctggcgcttggcgttttgcttaatactccagtgctgatcaattaaataaacggacttataataccagtttgttgctggcgataaatctggtgccgtcactgggattttatagtttttcttttcctctgaataaaacttacggaaaatcggatcaatacttgcagtagaacccgcgataatagatgttgatgaattaggtgctacagccattaagtagccatttcttatcccattgctttgaacttcgttacgcagttcactccacgcttcgcttgtgtatttacgtgtttcaaaataagcgcctgactcaaaatctgagcctttaaataatggatatgcacctttttctttagctaagttcatgcttgcctgtacggttaagtaagcaatttgctcgtacaattcatcgcaatatgctaccgcttcatctgtttcccatgctattttctttaaggcaagcaaatggttccaaccaaatgtgccaagtcctactgcgcggtacttttggtttgttagttttgcttgaagtactggcaaatcatttaactcaataacgttatcaagcatgcgtacttgaattggaattaaacgttcaagcacatcttcagttacggctctcgctaagttgatagaagaaagattacatacaacaaaatcgcccggattctttgtaataataatttttccgtcttccgtaatttcctctgttacgaccgttgtgctttggttttgcgtaatttctgtacataagttgctgcagtagatcatgccctcgtggcggttttgattagctcggttaaccgtatcacgataaaacatataaggcgttccggtttcaagctgggaaagcataatgcgcttgaagatttcaatagcaggtactgtttctcttgaaagctgttcattatttacacactcagcgtaacgagtgcggaacgaaccgctgccttcttcttcatcataaaaatcttctaacgagtagcccatcagcgtacgaacttcgtgaggatcgaataagtgccagtcttcacgtgcctctactttttccataaacaaatctggcaaacatacaccagtgaataaatcatgcgtgcgctgacgttcgtcaccattgttcaaacgcgcatctaagaatgaaaagatgtctttgtgccatacgtctaaatatacggcaatagctccttggcgttgacctagctgatcgacacttacagccgtattatttagctgtttcatccatggaattgttcctgatgatacgcctttaaaaccttttatatcacttcctcggcttctaatatgaccgaggtagacaccaattccgcctccatttttactaagcgtggccaaatctgtattgctatcataaataccgcgtaagctgtcatcaatcgtatcaataaagcagctagatagctgtccgtagctctttcctgcatttgaaagtgttggtgtggcaaccgtcatatatagactagaaagcgcccaatacgcttcttttactaatgctgttcgattttctttcttttcttgagacatcagcgtcatagcaatgataagaaaacgttcttgcggtaattcgtatacgcgcttatcatgtgatgtcgctaaatagcgatctgctaatgtcaacaatccaatgtatgtaaataaacgatcgcgttcaggaataatgactgaagcaatttcattaatttcttcttctgtatatgtttttaatagctgcttattataaatgccgatttttgttagttcttgaataagctgataaaacgaaccgtacttctcttttttatcgtaacctcggttgtccgctgcttttcgatatagttcgtttaagtagacgtctgccgctacgtacgtccaatcgggttcttccattgaaatacgctctaaggctgccaaaattaggacgtttgcaaccttttcgtccgtcatattttcctttactgtaacagtttgaataaccttttcctcatacaaagaaaaatcaagctgcgtaaattctttttttaaacgttcaatatatgcagttaattcatgtagaattgtaggctttaatgtattcaccataaatatggctcctctcttcacttcaaaataaaaaatcgctcaccgtacctcggtgagcgaatagaacgaagatagaagaagacactaagtcttttctcaatcctcgctctaccctctcacctcccgaagaagataaaacgacataaaaaaggcaggtctcctgacttatgcttctttttactttaaggccttcccatgatgtttactcacagtggatctccttatttcatcagcattcacagttgcgggaacagctttggattttcaccaaattcccttttaagtctttttatcagacacctttttcactggaaaacacaaaatatagtattttattatagattccaaaacaacatattgtgttatgttataaacacattatataggacaacttagaaaactatcaacctattttcaaaaataattttgttttttacgataaaactcttcgacttttttcatcaaactattccatcataacatgttttgacacgcttgatggaacaatgtgctctttttaaaaaatttgtcctatttttctactaaacattgacaacctcaataaaaaaaccgtttttcatcaaaaaacggtttttaattatttgtattctttttcaaatgatttgattgttttgataaactttttatcaatatcgtatcctatccccggttttcccttcacctttattactccggcttctacctctacttcgggcttaataatatctttttcccaatagcgagacgacgcagaaatatcacctggtatcgtgaaagaagggagtgtggcaagggcgatgttatgagctcgtgaaatccctgcttctaacattcctccaacccaaagtcttacaccatgccggacgcataaatcatgaatttgctttgctacggacattccgccaactcgcccgattttcacattgataatcttacagctttcttgttcgattgcatgacgtgcatcttcacagctcacaatactttcatctaagcaaattggcgtctttatttgcttttgtaacaatcgatgatcaaggatatcatcagaacttaacggctgttcgatcatcattaaattcaattcatctagtttctttaatgaatcactatcgcttaaagtataggctgaattggcatcagccataagaggaatgcttggaaattcatctcgaatttgtttcagtagctcatagtcagcacccggcttaattttcactttaaagcgcttatagccatctttcatgtaagtctttatttgttctttcattacggaaatgtcatttaagccaactaccactccagcttctacagcagaccttactccgccaattacttcagataacggcttgttttgccgctttgcatacaaatcccatacagcacagtccaaagctgctttagccatgttatttcgctttagaggtttgaataacttttgaacatcctctggtttttgaagctgctgatgaagaagcgagggaattaaaaaatcgtctaacatatgaaaacatgtctgaatcgtttcttccgtataccaaggagatgaaaaagcaacgacttctccccaccctgtaaatccttgttcatcttctacttcaagcaaaatcaattctcgatcctgtactgtaccatagcttgttgaaaaaggagaaagaagcttcatgtcaattttataaagatgtactttttttataatcatcgattagctccttttctgtatgaacgatgatagcttccggcgtatgattttattagaagctgttcgcggcagctcctctactcgaacgaaatactttggaagtttgtactttgctaaaaattgttgaatgtgtaaagataattcttcatctgaaacgtcttcgtttacaacaatacatgcagctggaacttgtccccatttttcatcacctactcccgttacaccggcctctttaacagcgggatgcttcaacaaaacattttcaatttcagctggatatacattttctccacctgaaataataaggtctgaacgtctgtctaacacatatagaaagccttcttcatccactttcccgatatctcctgtatagaaccagccttgttgaagggctttttcagtagcttctggtttatttaaatatccttttgtaacatttggacctttaacaatgatttctcctgcttcgctggtctcatttcctttttcatctacaattttcattgcacatggaaacaatggtttacctgctgatcccagttttcgcaaactatcttcaggtgaaagcgtaacgaactgtgaagatgtttctgtcattccatacgtttgataaacaggaatttctttattcacacaagcctctaaaatagtaagcggtgcaggtcctcctcctaaaagcatgcatcgaaacgtatgcggatattttcgttcccctaactcatcgagcatgttggacagcatggaagtgacaaccgaaataatcgttacctctttgttttcaattgcttcatttactgctcttgcttcaaaccgttcttctaaaatgattttcattccgtaaaagacgctccgcattaaaatagataagccgctaatatgaaacaaaggaaccgctataagccagcagtctttttcgtttaatcctaaattaagcgctgagccaacggaactccaccagtgatttccatacgtctgcagcactccttttggatgacctgttgttccggacgtatacataatggtaaatgtctcctcgagattccacgttttttgaaaatccgtttctgcttctggagaactttttaaagcaggtaaagtaagctgagtaatggaactttggaattctctcattaaaaatgtttcatccgcaataagcaacgacacgtttgcatctgttagctgataattaatttcttcgtttgtcaaacgcgtgttgacgagcagcaaccttgcaccaatataagaaaccgcatgtaaaatctcaataaactccactctatttttcatgtataaagcaatggtatcgtcttgctttacaccgttaaacgaaagctgctgtgctactttttgaacacgtttatgaagctcttgaaacgtaagagacgtttgggatgtttctaccgccactcgatttggcgtcaaatatgctctttgcataagcccattgggaatcgtttggctactcatgaatttctctcctttttatactgattaactaaattaaattgaaaaaacagcctgatgataatcaccaagctgtttcagctgtttaagggaaacgtgggaactgttggaagtctggattgcgtttttccttaaatgcatcgcgaccttcttttgcctcatcggttgtgtaataaagaagcgttgcgtcacccgcaaattgctggataccagctaagccatccgtatcagcattaaatgctgcttttaagaaacgaagagcggttggacttttttctaacatctcttcacaccattgaattgtttcagcttcaagctgttctaatggaacgaccgtgtttactaatcccatgtctagtgcttcttgagcgttgtactgacggcataagaaccagatctcacgcgctttcttatgacctacgatgcgagctaagtaaccagagccatatcctgcatcgaagcttccaactttaggacctgtttgtccaaatactgcgttatccgctgcaattgttaagtcacatacaacgtgaagaacgtggccaccaccaattgcatagcctgataccatcgcaacaaccggctttggaattacgcgaattaaacgctgtaaatctagaacgtttagacgtggaatttcatcttctcctacatagccgccgtggccgcgaactctttggtctccgcctgagcaaaatgctttatctccagcacctgctaatacaattactccaacgcttgcatcgtcacgagcataagcaaatgcatcgatcaattccattactgtttttggacggaatgcattgtgcacttccggacggttaatcgtaattttagcgattccgttatatgtttcgtataaaatgtcttcatactgacgtactgatgtccattcaactgtcatctttatttcctcctaattatgtagtagctaagaactcacttactattctaccaaaaatctcgggttgttccacgtgaattgcatggcctgtccctaaaataattctagaagtagcatttggtattaatgtttgcatttctttggaaattaaacaaaacttttgatctacttctcctgtaataagcaaaaccggcatcaacagatcgtccagcttctcccaaagggacggctggactcctgttcccattcctttcaaactgttggaaaggccgatttctgtatgcgaaagtctttctttacgcaccgcttcttgaacatggctaggcaattgcttttgagaacgaaaaagaggaatttcctcccaaaatttaacaaattcttcaattccatttttcataatgcggctcgccagctgttcatctttttcttttcttagcttttgttcttcccgcgtttttaaaccaggcgatgcgctttctaataccaactttttcacatggtgtggatatcgctgggcaaatgaaagagcaagccttcctcccatcgaatatccaattacattcacctgtgataaagatagctgttgaagaagctcatgcagtgcttcaacaactgcttccattgaatatggtttgatttctttgggagctgctgattggccatgaccaataatatcaacagcaattacctgatagtctttaacgaatttcttcataaaggtacgccaagtttgagaagagccggtaaagccgtgaagcagaagcagcggctctccttttccctcggtgtgcacatggtaagatacaccacttaatttatacctcattgcctattcctcaccgtttgacaaatttatttcctcggaaacaagtttccacaaactgcgatgagtctctacattttctgtacgagttgtacgaatctctacaacatgcaacccgccctttgtgaaagcatggttcattgcatgtcgaaattcttcccagctgcttgctgaagaaaatgtgccatcatacagacgagtggcatgctcaaagtttaatccagttggcgtaccgaataaaaattcaaagtgcttttcttgttttgactgcggtaaaaatgaaaaaattcctccgccgtcattgttaactagcacaacggttaaatttaaattatgcattttagctgccagcagaccatttaaatcgtgataaaacgataagtcaccaataaataaaacggtgtgatcgtaagccgtgcttacgcctagagcagaagaaactacaccatcaattccatttgcgccccgatttacaaagagtggaatatctttttccgtatttaagaagaaagaatcaatatctcgaacaggcattgaatttccagcaaacaaagccgtgccttcaggtactacatcaacaatttcttgaactacttgtccttcgaaccattcctggccagaagttagtgttctcagagcctgtgcagtttgagcattaatctttttccacagactcagccatgaagtagattcctcttgattcgctgaaagacgcttgatcagttcttcacaaaataatgtctcatcggcttcaatcatcactgtcgaacgtaaagtagggtctctccagcctttaccttggtcaactacaaacatttctgtcggctcgtgtgctttcaaaaattgcaatagcggtttcgataccggcatcgcgccaaaacgaatgacaacttccgggtaaaaacgctcatcaaccttatcactttttaaaaatgtatcatatgtctctattacattttcttttgaatgcttgccgcttcttaattgtgataacggatctgcgagcactggaaagcttaaagattcagctaaacggcatacgctgtctactgcttttaaagacatttgatctccgcatataataagtccttttgttgttccctctaagcgcttcgcaatttcttcgaaacctttttcagatagagatgcttctccatgaatagcagacacatatgatttaccgcgtttcccttgactccataaatcttcaatagataaatctggtacaatcggttcacgtaaaggtacgttaatgtgtacaggaccgctcggtatagcttgagctgtatgaacagcccttgaagctactgttcgaatataacgattcatatctgcactttcttctggtaaagctgtatctacaaaccacttcgcatattgaccgaaaagatgattctgattaatggcctgcggggcacctatatcccttaactcatggggacgatccgctgtgataactactaaaggaatgcgtgagtagtgagcttcaattactgcaggataataattcgctgcagctgttccagatgtacatacaagcgccactggttttttctttgcttttgctattcctagagcaaaaaagccggcggaacgttcatcaatatttaagtgtacatgaatatcagggtgctcagccataagcatcgcaataggcgttgaacgtgaccctggactgaccactacttcttcaacatttgcttctactaattcatccacgaatgacgcaatatacgttgttaatgatttaatgtgttccacgcataatccctcctaaagctgaaagcatcgggttgaatttaattcttgtttcttcatattcactttcaggcgtagaatctgctacaattccacagcccgcaaataaaacggcttctttttgctgaataacaccagagcggattcctactataaattcaccgtttccgttgatatccatccatcctaaaggagctgcataccaccctcggtcaaaggattctagctgtcgaataataggcaaggcctcctgttgaggatatcctcctagcgctggtgttggatggagcttttgaataaatgaaaatagcgttacatcttcctttatacgccctttaacaggtgtatacaaatgttgaatatgctttgttttatataaacttggcgtacttggaatttctacttcataacaataagaattcatcgcttctttaatcatatgaacaacaacatcgtgttcaattaagttcttgggatcttgaagcaattcctcacctagttcgtgatcttcctgccttgtctttcctcttggaatcgaacccgctaaacatgtggaaaacacataatctccttgtttttgcactagcctttctggggaagcgccgataaaatgctgatgctctccctctaaaatatatgtgtagctagttggctgttccttcaacagacgctgaagcacgtattcagtagaaatatcttcattaaatttcacttttaattgacgagcaagaactactttctctatagcctgttgcttaattaaagtagtagctctttcaatatttcctttaaatttctctaccccaatttcctctttttccaacaccaaaggtgaaatatgggattccccgtcgtactcttcacaaagaacaagtttttggacctcttcgaaataattgatgtgctttttaacagaatcttgtcctttaaccatcatattaacggtaaggtatccttctttgtctacctgagtatataacacagttggaatcataaattttgaactcgggaaatcactccaatagttttcttgatactgatttgggtcaaatgaaaatcctccaaataaaagaggacctgtcccatcaggggaaatttggttatttttataaaagtcttcttttataaagcgcttccattcattttcaatgtggaaataacgttcttttgccgcattggtgcaaatagtatgcgcatatcctaatccaacaaatgtataataactgttgggatctttccaaaaaaagcgttctttataaaactggtcatgtccgttcgcataaaaaataagggggtcaataggtcttacttttttcactaaactgaccaattttgggtgattttcattttttgcacactcaatcgcatctttaatgtattcttgtactaactgttcggtcgttgcaatcacactacgtccccccgttcatctttttttcttaagtctgtaactaacttattataaactttcagttcaaaaaaatctagcatcgcgattcacgagaaaaaattaatttcgcttgtctaaattatgccttttcattaaatgaattaaaaatctttatgatctattcagtactctttagacctcgagagcgttatttttatcatacccttttctataacctttaactttctttaattttccactccttttctctcttagcttcatgaataccccaaatactcctaatatgaatcgtgtttttttgaatttttaacacatactacaaaagcacactaaatttttaagggggagcttcatgacactttcaaaacaagaaatcagtcagttaaaacaaaatttacagcagcagcaggctgatattcaatcgcactttgatcaaaatgatcattttggtctaactcgaagcgacgctcacgatgctgtaggagaactttcaagctacgataaccaccctggtgacacagccacggaaacatacgagcgtgaaaaagaccttgcattaaatgaacatgcaaaacaagagctacatgaaatagaagaagcacttcaggcaatcgctcacagcacgtatggaacgtgcaaagtatgtggagcagatatctcgtttgaaagacttcaggctgtaccaactactttatactgtagagaacatagcccatcgcaggatattccaaagcacagacctgtagaagaaaatgttctccatcacccatttggtcaatacgactatgacgataccgaaacaacaggatatgacgcagaagattcttggcaagacgttgcgcgttacgggacgtctgaatctccttctgattttatagaagatacgtctaactatagtgaaacctatattgaggcagatgaagctattggatacgttgaagattatgaaaactttgccgctaccgatttatatggacagcctcttcctatttacccttcaaaagagcatgagcgatatgaaaatgcactggatgaagaaggtacgatgaccatatttggagatttaccggcctatgagaaagatccatacactgaaaaggagtagttcttcatactactcttttttctattttttggaggagctataggagatgatatcgaataaataggagattagaattaataatgaggtgaaaatgatgaatgcacatgaaattgattataaattgtatggagatgacatgcagtttgttgaaattgaattagatccttcagaaagtgttatagcagaagctggaggaatgatgatgatggaagatgatattgagatggaaaccatttttggtgacggttcttcttccaccagcagcgggctgtttaataaactaaaaggagctgggaaacgcgtattaactggtgaaagtttatttatgacggtatatacaaataatggatatcacaaacgaaaagtatccttcgcttcaccttttccaggcaagattattcctgtcgatttagagcagctcgatcataaaatcatttgtcaaaagagctcctttttatgcgctgccaaaggcgtatccgttggcattgattttcaaaaaaaactaggaacgggcttctttggcggtgaaggttttattatgcaaaaattagaaggtaatggcttggcatttttgcatgcaggcgggaccattcataaaagacagctgcagccgggtgaacgccttcgagtggatactggatgtttagtggccatgacccgtgatgtaaactacaacatcgaatatgtagggaaaattaaaacagctctgtttggaggggaaggcatgttttttgctactctgtcaggaccgggaacagtttggattcaatctcttccttttagccgactagccgatcgcgttttatcaagtgcagtttcaccaacgggaggtaaaggtgaaggcagtatccttggttctttaggtgatttcttaaacggtgacaacagataaaataaaaaaggtgtagtctttgactacaccttttctatttattgatttaataaatttttagtggaatgaatcccccaaatatcagatgcatattcctcaatcgttcgatcactagaaaaaaagccggagtgtgcaatgttcgtcgcactcatttgaagccatttattttcatttctataagcttcgtttactttttgctgtgccgtaacgtatgagtcaaagtcacggagtacatagtattcatcattttgcattaataatgaatcatatataggctcgaataagtcatatgtgtcaggcaggaagccgtttgtaagctgctcgagcacttggcgaatacgcttatcatgatggtaataatcataggcacggtatcctccattttgctgatagctcaacacttcttcggcttttaatccaaaaataaagacattatcttttcctactgcctcgctaatttcgacgttcgctccgtccatcgtgccaagagttaacgctccgttcatcatgaatttcatatttcccgttcccgaagcttctttgctggcggttgaaatctgttcactgacatccgctgcaggaaagatatactcagcaagtgacacacgatagttttctaaaaaaacgacttttaaaaacggtgatgtttgtggatcattattgacaacatcagctacagagttaattagcttgatgactttttttgcataataatagccgggagaagctttcgcaccaaaaataaatgtacgaggaacgatttgaaaattagggtcttcttttaatcgattgtacaaatacataatgtgcagcacatttaaaagctgccttttgtaagcatgaagccttttaacctgtacatcaaaaatagaattagaatctattttaattcccgtttgctcttgaataatatccgcaagcagctttttacgctgttgttttactgtttttagtccttgtaaaaaacttggatcttccacgtactcttggagctttataagagaatgcggctgtttaatccatttatctcctatcacctcggtaataagggaggaaagctgcgggttagcttttaacaaccagcgccggtgggtaattccgttcgttttattgttaaatttagcaggataaaactgataaaaatctttcatttctcgttcttttaaaatatcagtatgaatctttgccacaccgtttactttataacttcccacaattgctaaatgagccatctttactaatccgtgcgctaaaatagccatattttcaatccgctgccagtcacctggatatgattcccataattctttacaaaagcgctcattaatttcttcaataatcatatacacgcgtggaagcaagggttgaaataaatcaattggccatttctcaagggcttcagaaagagtggtatgatttgtgtatgatatggtattggacgtaatatgccatgcatcttcccattccattttttcttcatccagtaaaattctcattagctcaggaatcgcaagtacaggatgagtatcgttaatatgaatggctactttttcgtgaaagtttgtaagtgtttgataggtatttcgatgtgctctgataatactttgtaagctagctgacacaagaaaatattgctgtttcaatcttaatattttaccatcttcatgtgtatcatctggatataaaaattctgatacagcctctgtttgacgcttatactccatcacatctttatgtactggaaatgatgaaggctccgcattccaaaggcgaagtgtattaactgtatctgttttatacccgataaccgggatgtcataaggaacagcagagacgggttctccttttacatgacgaaaagagaatttttcgtcttcctgtaccatttcaacttcgccccaaaagttcacttctatggcttgatctaatttgcgtacttcccatgaattcccatgccttaaccactgttctgggagctcaatctgaaagccgtttacaatcttttgatcaaacaaaccgtgtttatagcgaatcccataaccgtggccaggaagattaagtgaagcaagagaatctaaaaaacaagcagcaagcctgcctaatccgccgtttcctaatcctgcgtctacttctatctcttcaatattttcaagtgaaatattcagatcacttaatccttcttttacaacttcccgaattcctaaattcaacagattttgacccaatagtctgcctagtaaaaattcgatagaaagataatacacttgctttgtatgtgaagacctatgaatttcattggttgaaatccaatcgctgctaatatactctcgcaccatatttcctaatgtatgatagtgatcttgaacagtagattctttaaagctctttccatatgtcatttccagcttttttaaaaaagcctcttgaaagctttttttatcagagaacaatctgctcaccctttcacgatggagtagatgtcaaatttgaatacaattgattatatttaaatgccgattgcccccagctataatcctgactcatagcatccatcattaattttttccatacatctttctggtgataaaatgaaacagctctttctaacgtatgaagcatgtcatgagcattataattcttaaaagagaagccatttccctctccgctatattcattataagctttgaccgtgtcattcaggccgcccgtttcacgcacgactggaatggttccatattttaaggctattaattgtccgagtccgcaaggctcaaaacgggaaggcattaaaaataaatccgtaccggcataaactttatgagcaagttcttcattaaaaccaataatagcttttacttgttgcgggtacgtatcttccatctcacggaaaaactgctcaaactcgtgttctccagttcctaaaataacaatttgggctcctaagttaaccgtctcatggaaaacgtgcttaactaaatccaatcccttctgctgagttaaccttgtaaccatcgaaataattggaacatccttattttcttctaattcaagatagcgctggagctcttttttatttttatatttcccttcaattttttctaccgaataaggataagatataagctgatctgcgtctgggctataagcttcttcatcgattccatttacaatcccaattaaatcttgatttcgctgacgtaataatccatctaaactttctccgtaatatggcatttgaatttcatctcgatatgtaggacttaccgtggtaattttatcagctgatacaagcgcagctttcataaaattaatattcccataaaactcgagctggcttgtagtaaaataatattcatttaaatttaataactcatataaattgctcttagggaagattccttggaattgcaagttatgaatcgtaaagaccgtctgaatatgatcatacatatcataattagcacgaagtaaaaatggaatcatagccgtatgccagtcgtgacaatgaataatatcaggctcattctctaaaaacgggatagcttcaagcacggctctgctgaaaaaagcaaatcgttcagcgtcatcgtagtgcccatataagctatctcttttaaaataatattcattatcaatgaaaatatatttaacgccatccatcgttaacgattcaattccgcagtactgtcttctccacccaacctgtacatgaataactttttcaagcaccatttcatcttgataatgttgaggaatcgttccgtactttggcatgactacacatacgttcgttcctaacttttttaattctttaggcagggcaccagctacgtctgctaatcctcctgttttaataaaaggtacacattctgatacagcaaataatacattcacgacttcatcaacgctccttgagttgttcctttagcaatgactctaggtaatcctgactcacctagcaacgtttcattacttcctattttcacatctttatctaaaacaacattttctaatacactattttctaaaataacgcctttttgcatcacaatgctattcttaacgaccgtaccttttccaattttaacgcctcggaagataatactattttccacatgcccttcaatcacgcacccgtttgcaatcattgaatttttcacaaccgctttttttgcgtaacgagtaggcggttcatcttttactttagtgaaaacaggacgttcgttgataaataactgcttccagacatctggagataaaatttccatacttgttttatagtaggcatctaagctagaaatctcagccgtatatccatggtgctcatacttttctacacgatgagattgtgccatatatcgaaccatttctttaatcgtataaaaatcatgggattcattttgcaaaatattaacgagaatagatttattaataatatacatattaagcgatttatcaccctgcttcatttcagtaatatctgcatttgaagcaatatgacgttgcaacacgtgctcaaagtcaactgtacatattgtataactattcgcaattaatacgtattcctgcttacttcttaagaaataatcaatatgataacggaactgcgtgaatagtgatggactttctaagtgtaaatcacttgtcataggagggaagataaacaatccatctcgcttccgatccaaatcccactcttttcctgaacctatatgatccatcaatgcgcgatagcgatcacgaggaaaaatggcaacgctcgaaattccagagttcaccatattagaaagcgtaaaatcgattaatcgatagcgtcctgcaaaaggaatggcagcaatcgatctataaaaggttaaaggctgcagcgctgttgtgtttgtacaagcatcaataataccaagcatttgattattcaatgtcgttcatcctctctgttcgttaaatgcatttagcaactgattcaatcaattcttgagtaacaagaattacttcttcgcttcctttggtcggtcgaataatagtaccgtctggaacttcaatgtccgatggaacaattgcgttttcaatatatacgttagagcctatctttgcagtaggcatgacaaccgttttcttaacctcagaacctgagccgatttgtacacctggaaataacacggactgctctacgtttccttcgacaacgcacccttcatttactaatgactccaccacgcaggcgtttggcgcgatatattgaggaggctgattagggttaacagagtatactttccatgaagagtcaaataaattaagctcgtctttatcacataacaaatccatattcgcttcccacaagctttttacagttcctacatctttccaataaccttgaaatgggtatgcaattagctttttcttttcatctagtaaaagcggaataacatctttaccaaaatcatggcttgaatatggattgcgtgcatccatttctaaatattcttttaaaatactccatttaaaaatataaattcccatggaagctagattatttttaggacgctgtggtttttcatcgaactccattacgtctaggtcactattggtatttaaaataccaaaacggctcgcttcttcccaaggtacttcaataacagaaatcgttacgtctgcttctttgtttatatgataatcaagcatattttcatagttcattttataaatgtgatcccctgatagaatcagtacgtactcaggatcatattgtgtcaaatagtttaaattttcataaatagcactagccgtgcctttataccactttactccatctgactccgcgtatggaggcaataccgtgacgccaccattccgtcggtccaaatcccaagcgcttccaattccaatgtatgaattgagaactagcggttgatattgggttaatacacctactgtctcaatacctgaatttgtacaattacttaaagcaaaatcaataattcgatacttaccaccaaatggtacagctggctttgctagattttttgtaagcgaactgagccgactaccttttcctcctgccaataacatcgctacgcatttcttttttaacatgttgttttctctcccctcgttttctctttgctcgtagtatactaatgccaaacggcggaatattcatttcaatgcaaaaaggttgaccgtgaaacgattcatccactgattttaatgcctttttatttacaatgcctgaaccgccgtacacttcgtcatcactgttaataacttcaatgtactctgtctcaactggaactccaactttgtaagaatgatatggatgctcagaaaaattgctaacaactataaaaatctcctgattttcttttgacttacgaataaaagagaagatttgttgatgatggttgttaacatcaatccattcgaatccatctggattatggtctaattcatataaaggcttgcttctcttataaatcttgatgagatccttcatatatccgttaagattgcgatgcatatcaaagtcataaagcatccaatccaactcctctaaatctttccactcatcaaattggccaaactctccgcccataaataaaagcttttttcccgggtgtgcaaagaagtatccatatagcagtcgaagctgtgcaaacttgcgccagtaatcacctggcatcttattaagtaatgatttttttccatgtacgacttcatcatgggaaagcggcaaaataaaattttcgttaaacgcatacattagtgaaaaggtcattttatcgtgaagatagggacgtctttccacgccagcttccatgtatgttaaagcgtcattcatccatcccatattccatttataattaaagcctaaaccgccctcatacgtaggtgccgtaacaagcggccagtccgtggaatcttctgccatcattaataccgtttcatcagattcaaaaacagcttcattcaactttttcaagaagctgacagctccatcattcactgcttttccagaagaattttgccaataaagcatattagctacagcatctactcgaaatccatctatatggaagtactccaaccaaaacaaagcattcgaaatcagaaaactttgtacttcaggctttcctaaatcgaaattagctgttccccaaacgtagttttcacgatcggattcttgtttgtattcataagtaggttctccatcgaacatatacagaccatgttcatccttacaaaagtgcccgggtacccaatctaaaagaactcctatattgttttgatgacactcatctataaagttcatcaactctttaggtgtaccgtatcgactggtggcggaatagtatccagttccttgatatccccaggatcggtcgagcggatgctcaatgactggtaataactcaatatgtgtaaaaccttgttcagcaatataaggaataagctcctgtgctaattcactgtatgtataaaggctgccatcttcatgagtcctccaagaccctgcatgcagctcgtaaatacacagcggtctttcatatatattttgctgttttttctttctacgccaatattggtcgttccatttgtacccatccaatgagtaaacaatagacgcagtgtttgggcgcacttcgctgaagaaagcgtatggatctgcttttaattttttttgattgctttgtgtgatgatttcatatttataaatagtcccttgttctaattcagggataaatgtcatccaaataccttcttcattaactttgaccatggaatgttgaaaaccgttccatttattaaaatcacctacaacgcttacaccctttgcatgaggtgcccacacgcaaaatcgtacgccttcaatcccttctaccgttacctgatgcgcaccgaaaatagagtaactgcgaaataagtttccttcgtgatacaaatgaacatcaaattcagtaggctgaaccgctagattcacttttgccacccctttaacttcaaacataatatacgcacataatatacgcttcttaccactcattccctcttacagtaaaaacataaaccttttctacaaatataatagaataaaagttcttttaaatgactctttatcccatactcttcatactttattactttatgaataattccatatgacatagggaaaatcctgcttaaaacttactttttattctgaaaattcatggtaattattcctaactattatttctgtttacttaatctttaaaaaagcgcaaataaaaaaggtttgcatatatgcaaacctttttgagatgacccgtacgggattcgaacccgtgttaccgccgtgaaagggcggtgtcttaaccgcttgaccaacgggccatatttaaatttaaaacgactggcggagaaggagggatttgaaccctcgcgccgcttacacgacctacacccttagcaggggcgcctcttcagccacttgagtacttctccgtatggctccacaggtaggactcgaacctacgaccgatcggttaacagccgatagctctaccactgagctactgtggaatatggtgggcctaagtggactcgaaccaccgacctcacgcttatcaggnnnnnnnnnnnnnnnnnnnnnnnnnnnnnnnnnnnnnnnnnnnnnnnnnnnnnnnnnnnnnnnnnnnnnnnnnnnnnnnnnnnnnnnnnnnnnnnnnnnntgttctgtcatgataataggacacttttaagctgtttttgaacgtcaaattaggtaattaacaattgtaaggctgctttcgttaacataggcaacaattgaataaacacataagcgatacttgtttttgttaaccaagaaatacttttttctttaaaacttacaatgtacaacaatccagccattggtatcatcacactagcaattggataagatatcatgcatacgatgtctaagtaaggttcaatattatcgtaagctacattggcaccaatttcttttgtctgctcgacaggatgtagtgcccaatctagcaactcattgacagaggctgccgttcctagtgtagcctctttatttatgaattctgtaattgttcctacggtttgaactttgccccacatgagaatacctccttagaatcctgctgttactgatacgagcaatctcataagcattggtgatagctgaacaatgatatagcctatggttgctccttgcatcatttctaacgctttaggacgatttccaagcagccaatagatacctgctgcactaaaggctaaaaatgcaagtggataagataaaccttgaactaattcagttagtggattaaatgcatcgatgacttttctggagacttcttctttaacagaggctgaagctgttgtagctgcaaatgacatagaaggttgcatagtgaagaaaacaggaaacatagtgccgaaaacaaatggcataccttcttgccctgtaataacttctgtggattctttaactggggatgggtttaaaaactctttaatcgtaccaaccgtttgaattttcttagatgtaaacatatgaattcctcctaataaaaatctgtaatagtaaaaacctctacatttaaaccttcacagagctttagtaattgcttacgtctataatcagtggtggtcatccagataagtttaggctttgttttgtatgctcctgagttaaataactgacgatacttattaattttcagtttgttaacactcatcttctgagtatggtcaatttcaataatatgatcgctccctctttcttcaaaaatagcatcacaaaccaccttcacgtggccttctatctctagcaagacctcattttcccatgtctccggacaaccatacgcgatgtataagtaatttctcatgatataatggcgggcttgaatagtttttttacgaactttgttgcaatcaacgcgttctctcccttccttagataaataataaattttctctccatcacgaaagtaatgaacgtactcatccaagttttgcatcactttacgagcattacgatccgaccctaaatcatgtaaggtttggagttgtgttctgttaagaaagtctagtttttttaaggacaggagtatctgatcggttctctgctcctttttgctcagtttgttcattatcatcatcctttcgaggttgaatgttgatatgaggtgtaataacctttttaatttgttcatcttctaagaaatagctttgtacctcatttgttccatccggtgtccttataatagctctccctttgactgtgatatcttcagctcctgtatggtcaagaacgactaaactctgattaccggtatccaaccgataacaaacttttgtaatggtatttgcttttacctggctatccaatacctctacagttggatattgagtcgagaaaactaaataaatacctaggcttgctgcttcacaagcgatggttttcatccaagctttgcattgctcataaaggaattttgccctttgaatatcttctttcgtttctaactccatacgtctataatcaagattgcttgcttcatcaataatgacatagtgcctcgttatgggctcttttacatcttgaatcttctcaacacctaattttttaaataagacttttcgacgtttcatttcttgtataactgctctaaaacaggaatgtgagctttctaaatcttcagctaggttcattacctgtttgcaatctttatagcgttgaaaagataatcctgatttcaagtcaatgaggctaaattcaacttcattagggtgtaatttaataaaagtattaatcagtagatgtaagaatgtagttttaccgtatctcgtggtcccagctattacagcgtgcccatcatctaaacgtataaaatgaattccatcttttgtttcaccaataggaacatgccatttcttacattgctcccagatagcttcactaaagggaaggtaagtaggtatatcttgatcatatactttgactcgtagcatcccatcatagctcatatggatgctttttcgtattaaatgcttttcaccaaagatttttcttatttcctcaaaaacacctgaaattgatttggttttacgtaattctttaatgcttacttttttcatgtcacctaacttaaaggtgaatactgtttttttgttattcaacccatcctcaaatttatcaatttgatctttaaagtcctgcagacctaaacctaaaggaatttgatagacatactccgtgtattttttgtttttaggacggtatctgcgatggatccggatagactggccggctttttttaaacccacattatctgcaatttgtttaattttctttgcgtcatcttcagcgcttccctccttcttcaattgagctaaacctaaaatagaagctgcagcaattgaggtcgtgatttcaatcagcacacctacaccccttctcttttgtatcctaaaggatagtctcttttaaacggaactcaaataattggaagaaatgttgtagttatcacattctgatgttccgtttaaaagcgtggaacggctttctattcggtaacatcattcggcactactgacggaattaaatttggtacatttaaaaggcattttgttcggtatgttaaatggtattatggaaggcctgtattatatgtcacgttctttgaacattttttcataaaactaaatatttttttgatggacaggatattacactttgatgtagaaacttcttatttgaggtgataattcatggcagtggaaggatttgaatgtaggttaagaattatttttgcaactaaaaagagtgaaaacccttcctttaaacaagaagaatttgcgaaaaaagtaggaataagcagggggactttaagtgcattagttaatgaacattctttacccaacttcaaaaatgcgtatattatcgctaaagagttaggcgttactatagaagaaatatgggtacaagtacagtaaataatttgtttatgtgtcaaaacaacaaatttctatagacaatctggtagtgttatacttacactattgttaaatgtctcttatgtaaataagtttaatttttggaaattagttaggttgggcatactatatattgcctttatacatacattagtaaaaacactgagcctgaaaaggagtttcttttatggaaaacaaaagacattatcaaaaccctccggttagagaagtaatttgcgaatttcgttttgatgaaaaatcagaatgggatgctactattccgggattaatttacgatgagcttaaagaagcttatccactaaaaaagcgtagtaatgaggttgaaattactaacgaaggtagtacatctcgctccgttcaaatgagtgatagaattcagttctttaatgaacaggaaaatgcagcaattcaaattgcccctaatttattagttataaacttactagctccttacactaattgggataattacctgggcatgatcgaacgcgtatttacaacatacaaaaagatagctaacccattagatattgttcattcaaaattgcattatataaatgagataaaattcactcaagatgtagttgagttagataagtatctaaattttgtcccttttctaggaggtaatcttccaggcgactattcatcttttatcttaggagttaaaattccttatgaagaagaaaaagattatcttcgtattcaaatgcagaatggtaaatcacataatttgatacttgatttagcctacacgaataaccagattgaaactgttaattttgaaaatatgtttgtatggttaaacaaagcgcatgataatatcattgaaactttcgaaaactgtattaaagatgatctaagaaaaacatttgtggaggtgtaatttatgtttatgaatggtacaaagccgtccatttcagattggtcatttgacgatacacctaaatattttccacaagttattggtcaacaaatacaacgtatcttttcggatttttcttcttcattgactagtactttactttgggaagaggatcaacgtgaaaatgctctaagtgatgtttcatctgaaatgaaaatttcttatttagaaaagttatatgtattcactgataatcgcctagttgagaaatttcttactgataatccttttcttattaaagtgttatttgaggctttttttcagatacaagaaatttttcctcaagatgttcaattaaagctagatctccaaaatggagacgatgttgctgaaagtgagaaactttatttattaattagcacaaatatagatattgatgatgcttatgatttacttgatactttagatggattatggtggattcaaaatgcttcaaaggtcaaagagaaaatgaatattgatttggagatttaaatcatgtttgactggcataaatatctcaatttagctcaagagctctcagaaaaagatgatgaagaatttaaacgctctgctattagtagagcgtattattcagcttactgtaatgctagaaattttttagaatctaaagggcttggacttattcctggaaaaaagaatgatcatcaagcgatatggaatgctttcagtaagttaaagggggcagatttagtaagcatcgctactacaggggaccgtctgaaacaaaagagaaagaaagctgattacgatgatagaatcaataaccttgataagattactaaaagggctattacagaagcagaaacaataaattccattattaatgagaacctttaaacatttaagatttaaaaactaccctagtttaatattaaactagggtagtttttttatagaaattcattttttagacattaatagcctttagatttcaatacagcttgcagcttactctttgtatttggaccatatgtgccgtcaacctcatatggtaagtaaactttttggaagcgcgttactgcatccttagttttatctccataaatcccgtcggctgtaccacatttaaaatcaacggcatttaacgcattttgcagctgctcaattgctgctttatctgttgagccagttttgagaacacctgcaggtaatggatatttatattctgattgctcttttttaggtgtttcaggagtaggtgtatacgtattttttgcggtaccaaacttaattgtttgacctacttttaattgagatggtttaatatccgggttagcagcaattaaatcctcaacagtaatcccttcttttccatcttttaaagcaatagaccaaaatgtatcgccttcttgaatagtatataatccaggtaccggatcaggttgcttaattactggcagcatatcggacaagatatctttaaatgctttattgtaatcaaatacgcagcaagctttccaagagtagcctggcatttcattatgtgccttgtcgtatttaccaattccatcagccattaaagctttgtgcaagtcaataatagagcgaatagttgcttcactaagcttatcagtacggtagtcaccgataacacagatacctaaacctattgtattgctgttacctacatgatagcttcgcttagcaatatctacacaataataaatagctgctcttccatcaatcacatgctttggatcaataattaaagcataagcgatttctggccagccgtttgtgcgtacatggaagtcagcaaatgattcaattttagatccacccgctgataatttagttaatgaatgatgccatacacgtgtagtaatggaattcacaccgtttttacgtttggcataagagcctttatgaactaatttacctcttttatcaactaactgtggtaacttttcaaatgcatgcatgctcatcttcctctcaaattttagttatataaaaaagccactcaatgaagagtgactgagttttatttattttgttttttagcttctctctttcttagccaaactttaagaccttggataaagtgtgtgttcttccacactgcatatacattgacagcaagtgctacaaaggctgaaacaacgatcacaaaagcattaatactttcagtagtaaaccaatcaaatgaaactccaattgttccgaagaaaaataaaagggcggttaagaaaccacccagtagtgtgaagacatcttttttcatattatcgacctcctattgttgtaacgcggcataggcaatagcaatcgctccaccaataactccagtaacaattgctgtgatgattgctcctgaaatcttacgtttaatccaagtggtattctcatcaattttgttcaatttttcattaagcataaaaatttgttgatcctgtaaatctgatttgcgctcgactgcatataaacgggcattatatgtctctaatttccccttaatttctgttatctctttttggaatgtatccatcggctgaacctccgttgtatttggcatggttctcacccctttgtataaaataaaaagaggactaaatttagtcctctttcagttaaatattattttttttgcaaacttttcaattgttcacaattgatttcttctattacaattcgaactgttttcccctcataatcaataagcttttcatccaatgtatccttacactcaataatagaagacacctccataaaatccctacatgattcaccttcccaatctctgtttaaccacactttacctattatttcttccatttcattcactcttttctttatataacaattcacttatccatttattaaaactagcttcgtccatttctacaatatgatttaagtctgttaaaaaaagctttaatacttgccttaatatttcatctagttcacaacagaactcttctatagtaatatatggctttaaagtttttctgattgttttttcactatttactgatccgtgtatataatttgatctaaatgaatacgcaatgctaacaactttgtttatctttattctttcttcaaaatccttacctaatacccttgccgttctatcagctacttgcattttcacttcaacgttcgaagttgaaaacaatgattctaatgctgagatataaaaagttattttagcaggaagaaatgattcgccacgtgctaatccaataaatctgattgctctttccaatctattatagctataataatcaatagctttattattattgttaatgcgtaattcaatagatccatcgtacatttcatcattatctttggcatcatgaaaaaagtgtagttttagtctttcaaaccaaattaaagcttcttgtacctcattagttgataagcctatgtcaacatattccccttgactatttgagaataacacaggatttttatctgtaaaaagcacattttgatttgtgtctatgagcacaatatcgtccaggttaaacgaattatcttttagtaaccatagcgataataagaaatgttgaaaataacctctaaaactctgtactaaatgataagggttttcattatctattagcatcctttgaataattacaggctttttgataatagagtcataataaattgaaccaactgtcataaatgtattttcattacctatttcttcaagtctatttgagttatgaatgatactaaagtcaccatcaactactatatcttcctccaaaattgctttatttaaaacacaaaatatacttatcaaaatttaatcactcctagattttattaactaaattataaatcctaggagttcttacgtggtgatattttcttttatctaagaaaagagaactaatttcagttctcttttttctgtatttaacacaaaaaataacgctctaggcgttttgtctcctatagcgatcttaaaaattgctcgtaggtgtatgaagatctatccattccaacttcattaaggtgatatccgtcacccagtgtcaatgcagatacttgtgctgcattagtccaacatactccaccattttttatattattgaataccggaattccatacttacctaacattaaaaccatcgcatctacataagcctgataattagcatttcttaagtacggagtaataaatcccattttagctttgggatactttgttaagagaccgtcccctaatacatttaaagcccctttaaacgtagaaatatccacactatcatctgtacccataggaaccaatgcattagcatcatttgtacccacatgaaacaataaataatcaaaatcatcggccatatctacatatctttcaaccaaacctttttgcccattatacaagcgatttgtcaaaaaggttccgtttatcccgtagttcacatacgtcatattgtttcttgacgctaacttatgaatccaagttttttcagcagataaagtgtgtcctttcatcatgctatcacctgatccacctagttttttcccatccaaattgtttggaatgtatgcagatggaggtttaacctgttgaattaatgatttaacataagctaccgtaggtaattggttatccttgaaatcaactcttgttaccacatcagtcgcgtttactttatacaagtaataaccgtcaattttggtcaagttttgctcttttactgtaacttttatgttactaacatcaaaggaggtttgttttgtaccatcaactaatacaacattaagaatacaatgtaaatacctatatgaagtagtcgataccgtttttgtaatcgaatattttgtttgcccaggaataaattccattgttcctgatggggttatttgtgtaccagaaattgcacctaacgaaggcgttgaagtatcattaaaaaagaactgactttctagtttatcaatatttacatcatcagagaatatatcagcttcaaacttgaaggtatccgcagttgtaagtccagaaattgattgcaaatcaaaagtctgaactaattgcacttttaagggatttgtactgttccctttagcttggatattgtatccgtcgaacggtttggttaaaggatctatcctttcattaacagttgcttgagctttatcgcttgcgattgtttgaactgtattaacagttgctaaattgtaggggaattgttcctctacatcttcaataacccctgtaccttccacttcatcagcattactataaaaaccatatcttatagggagtttagttactccccctatagtaacttttaaatttttaaaataataactagcgggtaatatcgtttgatcgttcgccattgcccatatataaacaaaaagataatcagaatcagcagccataacttgatttgaaaaatttattgattgaaactcgcctttacgtgccagtgtttcagtcgagactttacctcctgcccccacaagtgtagtaggactagtcgcgttgttgatcttggtagtgtatgcacgaatgttatcatcctctgtatatacatcatatgaaatattgataacttttcccactaagttaatgtcagctacatcaaatactaatctagttgctacttgtttttcataagttgataaagtactgtttaccttaacacttttgcctttaaattttgtgacatcatcagcaaggttatttaatttaactgcgcctgtactcaagcctgtactttgatatatccctgcatcagcccacattgtgccgttccaaatataaatatggccgttttctaaaacaaggaatacaccatctgtaccttgtggataggctgtatttaaagctgcaacggtattataaaatccctttggtgctcctgaaacagcagtagcaagcattgtttcaacataggactgatctgctttaacccctagtttattgtctacattttttgagagatcaagcaattcatctaccgatataccacggtcctgaatttcttttaatgcagcataggtccgattaaaaagccaattcaaccattcagcaggtggtcgatctagcggtgcccaaccattttctttttttgattttgtaggttctaatccaacatttttccattcaggaagttgataattatgtggcatgttgttgactcccttccttctttacagcggtgtactcacttctttttcaggtataatataagcgcccaaattccctcctagagttggattgttcacactagaaagaccagatccgtccgaactatcatttaagtatccaatctcaaatgttccatctagctgaacagattccacttgaacaccagctgaaagagaattttggacaatattaataaaagtatatggggttaagcctacgtcataaatcgtttgaataggcgtatttgtcataaaaattgtagccggcgtatcagctgaatgcatttgaaactcgctaggttcacaatccaatgtttgtgctaaaacttcgatgaccttattaaaagtaccatcagatctatcgcgcgcaattttgcttttgataagagctctataatagacatcatcggttgctttaccacgcttctgaccaacctcattccctatgatatcaagcgtttttccacgcgcattatttaaatctcgccactcttcaatacatgtgaaggtgtctttcagctgagtgatttcatcatcgagcatagaaaatattttacctaaaaaggtgttgtcatttttattgaaatcatccggtatcttcgaaaaccaatcttttatcaacttacattcacctcgattaaatcaacattggtccgagcaatctcataacttcctaagtttaagttgcccattataaagtcatcatcttctttagctacttgaattgtcacgtcttcaataccaggtgtctcatatacaaagctaaatagttgtgagtagacaaccttctcacccatcgccataccaacccactcagtgtcagtagaatctcttccgccgatttcttgtatgattttctgcttaatttctccaatcccattactaggaaagctattattcgactggatatcaattttgattcgaatttttatatcagtagcataatcaaacctgactgtatgctccgttccgctaatatcagttataatcacttcttcagaaccgatagtatcaatgccggcagctatacaattaaacaatgtgtcagccacatcttcacggtttccacctagtacataagcatgaacagcagggttcatacttactacacttgatgaacgaacacctgtagtgttatttaaacgagcaataattgcattaactgtggtattcccttcaattgccggagaattaataaggcgatttcgaagctccacatctgtttctagatctcttccaccagtagcagctagaagatttgttactgtagagatgttttccgtaggttctgcctgtaatttaatggttccagcagcaacgttcgtatgaatacccttctcaagcgaaacagcttcaccactcccttttcctgtctcatctagcgttacattttctatgagataaaaataaataaatttatctgtagcaaattgagtctgttcttgaatcgttgtattaggtacaccagtaaagcttagttctacatgagattctgattcctgatcacgactcatcgttttgttagctgctaatcgatcaagttgcacaccttcagctttactagaatatccactgttataaaccatttctgctagttcccataaaggcgctaagaaaaaagcaaagatcatgattagaataccaaatgggcttttagctgaaatgttaacgtcattgccgaatttctctttaaatttagtttctaaatctgcctttagatcttgatatgtcttacgtttaaatcctgttttatcaagcatttaaccccacctcgtcgatggttaattctgtttcgtcttgtttttgaatagttaacgatattttaagggtacgtccttctttaacaaaagaaatattcgttacagcccctatgcggtcatctttagaaagagcttcaataatgtcgtctcttatctctgcttcactagcacctttgctcaataaattatcataagataaaccataatcaggatctaaaaagaactcacctttccgtgtccttaatatggattgaacggattgaatgagttcttcatcacctgatatcattattaaatttccatccttcataactaaatcaccattttcaagttttggtgaaatcataccttaaacctcccaacaataactgcatcattcatgctatgcattctggaaaattgcggatcaaaaggctcatcacctaagtaatctaatgcataatcagcaaaactaacatatacaatatcacccactgctagagggctgttatattcaacatgatcaaggatatgagcgtctaatactagtgcgtgttcttccccgttttctttaaatagaggcttaatatcggctgtattcccatgtacggctgtaaccctagcaggagctgctacatgaatgctcgacttaattgcttgagcaaagtttaaaaagaaattcgtatcattagccattattagatcacctgcacttctgttttgaagtcagaaccactagctgtatgctttccttttttagcacgatactgaccatttgcagtcttacttttaatttgaatgatagaagctgttgaaatacgatgctgcagcaaacaattaactgtgtatccttttaaatcatcttcttcaaaagggtcaggggaacctaatagtccagttgcctcctctaaattaaagcgctcgtctgtaccttctttaattgaacgaataaccaatgtacctcttcgataataaagagctgcaccacaatcttttacaacttctaaaaggttatttaatatgttccctgttactgtatatccacttttataagctggattcttaggcaatttcatttctccaagacgtatacctaatgcacccactaacttgcgaatgatagtatctgccttcgtgtttttactgaacgcaatctttagagattttttatctgtacttgtagaggctgttacctttacacctgagtaatcttgtccttctgtcatatagatagttgtgattttatctacaccatctcgactagtcaaaactcttgatatcttaccttgcgaaagaataccatagtctgatttgtagcctgcctgcaatatcaaagtgttgtccttttttatatgattaatagaagtactggagagattgtagagtttaactgtaacttcattgggtgttgaatcatcatcaaaaggaacttcaaactcaatatgaaaattgtcattagaaaaatcagctttgtagtccccttcaatgtggaccttaatcactcttccaaacaattcattactcatacacttacctcacttaaatcttcatcaggtgcaatgtcatcaataaataaaaatgttgtcaccataaaattatcaaaggtaatgcgcttggtttggttagattcatctaaaaccactaatgacggtgctggcagtcgtcgatcaacagaatcatgccaaagtggtacatttaatacaagcttttcacctaaaataatggcctcattatctacactatacaaatccactgtaaaaaaattgcatgtttgattataattaacctccatcacaaatgtatctgcagcaagttctatttcaaatcgctcaggtaaactattcttattaatgggaatgtaatcacgcatgttctcacctcaatctatttcacccttagtttgacaccaatgggaatcctacggtcagggtacccattatatttccttagctgtgcaatacttgtgccgtatttctgccacatatcccagtaagtatcgcctttcttagtgacatgataaacagcgcctgtaggtttgttgctaacaggctttttcttgccactgttttttactttcacccacggtgtagaggcaatccgcatttgtcgcaacttaatagagatatctttgccgttagcattatttgaatctacagagccacttagatccaaaataataacgtttttagcaatattacgaccggtataggttagaatcgtaccatttttcatacatttcttaaggtattcgtaatcagattcataagaatctccatttaaaacgccggagagtgaaaactcatccggcttttgttcaacatgatctgtcatagggataccttgttctacaggataagatgtagcatcaaccgaagcagaatcatcttctttttcaattaacaacttgatgtttcctaaacgcgccattttcaccctcctatactaaacctgaattaataagaacctcttggaacttcttgtactgttccgctaacgcttcatcaatttgttctcttacactcttttcgccttctttaccgccaccagtaatggttatgaccggactaaactcgatgttaatctgactagaacctgtgtctccaacagcaaaagaaggagcagcagattcagagctttcccctggattactaggcacattactagttgttttcttgaagaaatctaaaatactaggccataccttagttccagtaggtaggttagggaatagagtagctcgatttggactaagccccatttgtccattcggaagcatgaagggctcatttaatccaccatcaccaagaacagcattacctccggtatgagaatttgtaccatttgcataccagttatggcttttccaccatcttaatgcaccaccaatactcttataacgatcttggatgtatttgataccccaatagatgttattagaagggttaaatggatcacctttgtagttaaagtgttttaactgcattagcccttttgctgtaccatcagatgttggagcgccaactgctctaggattaccacttgattctttttggataatccagtttagacctgtcttccatgcatcgccagatacaccggccctcgccatacctgcagcaatccattgtgcaagatttccttttggtgcagcgccataagaaccactttcaccagcttttccttgcaagtaggttaacggattgatgtaagcgccattacgcttaattttcaagtctaagtgtggtcctgtggagaatccagttgaaccaactcgaccaattacttgcccctctttgactttttgcccctgtttaacaagaggagcactcatcatatggatataagataataagtctgaaccactttgaatacgaacgccattacccgcagtgctcgatcctataaggacttgtttaacaataccatctgttagagatttaattggtgtcccctgtggtgcggctagatccaaaccatgatgaactccgcctttatggactctatcgttcttattaccgtttggtgtaaagtttgttgtaatacggaaaggacttcctaaataataactcccaatacctgtgccagatgcatctccacctaggaaagagaactcttccatcttcttcttaacaaaacctaaagcgttatctttaatctttgttatagaagcaggaaagactttattaaacacttcactgatggcaggtggtttagggacaaagctagcaaatacctttttaagcagcttagatggttctgaaacatatgaccaaacatcaagcgaaaggtcttttactttattagcgccagcaacagctgtatccttaacagcttttcctgctccaacagccttatcttttgcagctccagcaacatttttagttccttcccacaggtctgatgctacactcttaaaggagttaccgttacctacatttcctttatcataagctggtatcataccagattgcattaactgttgagtttgaggaccagaaaacactttagtaccttgaggtaaattcaataatgtatcagttgctggtgacatccccattgcaccactaggagtgacatataactctttcatgccaccatcaccaagaattgcaggtccaccaggatgatatcctgtaccagttgcatatttaggtacccacggatctatataaaaatctgcaccgatcttcttcatgatccagtttagaccaccagtggcaccattgatcattttcttaaatccgccaaatactttggaagtaagagcctcgattccaccagtgacttttccagccatacctgagataccagagcctatttttcctggtaactccttagcagcttttacaactcccttaaagacaccttcaacatcatctttaatcattccgaaaagttgcttcgtttcagaacgagctgtggtccaggctgacttaatagatgaacctattcgtcctagcatccctttaattccaccaaacagtgaagtccaaatgccaactactgcattcttaaatccagtcatgatattttgacctagcaacttcatagctgtaaatccatattggaccgtatttttcacatttgtaacactggctttaaagagcgaaactagaccttgccacaaactaacaaatacgctacggaaacccgagaagaaaagcttacctgcacttaggatacgaccaaacatcattaggttaatatagttccatactacctggatggccccaaagaacatctgttttaagccttcccacattttactgaagtctccagtaaataaacctgagaatacttttacagcacccataatgacgtttaaagcaccgtttattatgcctttgatattgccccataccgacttaattaacatcaaaacgagaggccatatgaattgcataatagaccatattgtattcatgactgtgcttatgaaagggctaattgctccccatatgtttttaactgcttgtaaaacttgctgaccgttattgtcccagaacgcttgtaattgtactaattttgcgtgaacaaaagtagttactgcagacatcgcttgattaatataaggcttcaaaaacccccatacttcaagcgccttattttttatagcagtccacccactgataactgcatttctgaatgtttcagagcgtgtccacaataagtaaagtgctgcaccaagggcgataacggcggcggaaactagcactacagtacccatcatagcagctagaccttccactaatggaccaataaacacccacgctgctgcaaatgctgcttttaagcccatgatataacctatacctgctgcaagaggagttaaaataagagcaaatgtagcaactaagtatagaaacattccagcaagcttagtgatccacgggttaatttcgttaagtttattaacaaattttccaatggcagttcctgcatcaacaactttagcagctaacttaccccaaaattcaacaaatggaccaacagcctcagcccaggtgtttttaaattcatataaggacgtaccaagtggtgttaaagaatcctgtaatcctttgacctttaattgtgtttcctgttttaacttttcaagctctgtagtagctgctgttcgcgcagctcccattcttcttctccacaggtcttgaatttttgctaattccgcatcagaagcattagccattgctctaatttgtccttctgttttaggacctaaacttcgcaattcagctatcatgccttgatctacccctcttttcacgagggtttgcatatttttattccagctttcaaatatcttaacttgtgaatttaagttatttataatacgttctggactagtatgaaatgcggtagctttgtcaaaaaatccccaagtcgtaacaatttcatgtgttctctttttgacctcttgttcgtatttagcccatgcttcagcttgagcagctaaattctctccgacgtcgggtccttttgctgcattcgctaaaatagctgtaaatccagcccatgcaacagaggtaaccattgctacagactgcatacgcataacaccttgtgtgatcatgccaatcatatcttggagctctttcatactagcgttaggcccaagcatttgaagagctaaagaagctgcactactttcccttgctaagcgtgacaaattagaagtaactgaaagtaatgggttgttaactttcaacaacgaattacccatgcggtcatagttcttcgctattttctcactttgaccactcatagctgacatagtagctacttgttgaatgatactttgacgcatggccacattgttattaatcatttgatcggtagacttcttatgttcttttcctagtctccgaatctcattcataaaatcattagtactacctgtgtaattacccatttgagaaccgagcttgtacatgtcatgctctgtcttcatgatttgctgacggtatttcaacatgtcattatggttgttgatcatagacctacgcatttcattactcatcgcttgccaatcatgggctaactgagtagcacttgttccggcagtactcgctaaggcgcgaataacgtcactttggcgccctaactgattattaagagcttgagattcatcaatcattcgctgagtagatcgataagtggaattcatttggttactcatttgccgcatttcttgtgtagcccgatttgtatgttgagccatttgttgcatttgttgattagactgaccaaacgccctatttgtttgattagtttgtcgacctgtttgattcatctgctggttcatacgattcatagagtcacgccactcacgagtagcattatctgtttgctgaaaagcacgtacagtatcattcatgtaacgattcaattcaataacaggtgctaaattaacactaggctgaattcttacatccaaatcacgaatgctcatattttccctcctttcttcgaattatttttagttacttcactttattagcgtcattcttttgcttaattaatttgttaagagcctcatttgcttgctgaagctggtaaggggacatttggtaagcctctgtgagactaatcattccttctgcaacgggcctccaaaaatcccaattatcctctacttctttttttacgacgttctgaggtttacccttactttccgtctcgaagaaaggtagaagcctctgtaaataactcgttaaatccatctttaggttcaatgcccttatcttcattgccgtcaaagtactcccaatctacttttggatctacaatgacatgtttaaataactcttctgccattttttcactagaaaaagtacctctgtcagttgtgcaacgatcttgaattcttacttgttctcgatgccctgggaattgcaatgtgtattctacgccttcaactgttacctttttttgagaaccgattttagccattttaaaaatctctcctttgtaatgtaaatataaagaagcagccctattggactgcctcaattcatttgtttttttgttatttggattacgtctagaacgtttcaatcaaatcactcttctgtatagtcaaatactttaaactggaattcacggccacctacttcggtatcaaactccttagaaggggttttaacaatacgagcctgtgttccaccagccttttcttttgttgtgccgttattatagttaacccatatagggaacggcttcttttgctttgcctttttcatcaaataaggatacgaaggtgatgtttgagaaagtgttagggtaatagttcctaacgtgttattactctcagaaataatagcttctccctgagcactaactttcgttgagaagaaatcctcatctttttcagcttggatgaacgatccttcatcatagccagtcataaaaacactatctacaattgcagatgcatactttggatcatacgtacgtgtcatatttgttcagctcctttaaactaaaatttcaccttttatttcagccgagtgaatagctccagctaattcaaacgaaaatgatagaccattataaacacgacttgcacgatctgcaggtaatgtttcactacgtggtactgttgtaactgtatagatagggttatcatcctcatctgctgcaataataccttgagcaaatgcttgttgaagaacagtcgttgctgcactatcgaacaacgcaatgcctcgactatcaaatgaaacttttccattgttagcaaaggcggattggacactgttttccatgttggttttaacccatgacttcccatgcatgacgtcaatgtactcaccacttacggtgataccttcgcttgtttgattaatgccagccttcttcacataagcaatagcaccatcttcatgaatagctgctagttcgtctgcatttatatcaagaacagtgatacctgttaatgacttgaacttccatgaaatagaaccaacatcttggcttcctaattcaccaactaatgctgcatcggcctgttcatctgctgttggatggtaaaagtcaatcacataatcataatctttcaccttaaatgcattgcggcttgctgcatcagttgtttttaccacatacattttgaatttcttaccttccacataatcagcaatagccacttcatctgttaactcaatatctgcagttaacaagaagaaccaatcgtgatcataatacttggcaatagcttctgcagctgttttaggatctgtatctgttgcagctggatcatatgtggcaatagctaaagtagctggacgatgatcttgagcaaaaatagcagctgccttcttgtagacctctgttgtttcagcaaagtccggttttacagtatcgatgctgctatatgttttaaatgtactcgctcctgctttttcagctataatgagtggcttgccaagtccaattaagccggatggctttcttagctcaatgcttacagttacatcttgtaatggcattctataaacctcctaaattaatagtttcaatgaattcacttagctgacgaatttgttcattcgttgctctaaactgcacatcgaaaccgtgtttgtattcataatgttcaacgagaaatgtagtgcgatcttcaatgttccctagcatcgcaatggctatattcttttcttctatgaattcttgacccaaaaataaaaaccactggtggacttgaaaagccttctccatcgtggtttcaacatcttcagcatagaagctaaacgatatagtgtacttatactgttcaatacgcttttgaaaagctgtatcgtcttcaatatactctacaacagccccttgtcctctgcctttaatgtatggtgacgtaatattataaacgccgtaaggtaagggaggagcaggatttattgtatttcctttaataatttgtagcccagtatctttttttatttgagcaatcatttctttaatggttgctatgttcatgacctgcccaccttgctaaataaataaagacatccgtataatctgtgaagtccttaaagttctgtacagtgtaagggatgcctttatattcgattttctgtcctggattaagagcttcgattgtataaactttacggtcttttacgctataagtgccactctctgaataacgaaggtcatctcctgataaaggaagaataacaccgaatctattttcgggctgaggacttccaccaggtacccaatcccctgcatcgtcgtaataaccaccctcttgttcaacaattgccacaaaaggaacaccattttccacaaccatttctttaaaactaataatctcaggcatttctttctaccaccctccaagttacacgggcacgaaggccaccagtgtcaattaaaggattggatgagcctttattctccatagtgataggactattcccaggagaacgtaaggtagtaatcttctcttgaatatcagcagctgcctttgccccgactcgctcaaataaagtctttgcatcaatttcaaatgctagcaccttatcgattaatcgctccataaactgcacccattcatcattcttttcatcaaatgttgaacgtacaaaagagcgttccggaatggtgacgctcttaacaagaatgaacatgacttttaaattgtcaccatcttgaatagccaatatatttttacctttcggcttaaataaacctggaatatctgaagctttacggccatccgcctcttttgtggggatagttagaaactgcttcttaggcttaatggttattccatattcatgcacgtttgcaatcatggcatagaacgaatcgtcagaggcaaagatgccaacttctactgagtatttgtcaagatcctctaaagctttgattaacttatcgaaattatcgtttttaacagtcatttttacaaagcccttctgtctagccatgttaaatcaccgttagattgatactatttcgctttgtaagcttttttaagagtctcgaatattcttgcccatatggtgtagattcaagccctacagcagtatttgagacgttatattcagtctccataacgtctaacttctttctttttactgtttgagcctttattgttgccaaatgagtggcataatagcgaattaagcgctgtttgttgtcctctgacacatctagattctctacctcaagggttgcgtcatcaataaagatttccagcacgtctggagacatactagctaaatgttcagcagtcttttgaatgatttcaggtgttgttttcaaatcaatcacctaccttattccgtttcttctcctgaaccatttacaattaagttactttgttcagtgatagcagcaaggacagtgctacgcttttctgtagctttccactcttctaataaagaaagtgagaacgtgtctttcactaactcaattgcttcatttgcgttcaaatccttagttgttttagcagattcatgagctacaatctcttcgtcttccactaactcttttattaaaggatgtgcgctgaacttcttccaatcagtaggagaaagctgatttgctccaggaactaacatgacaccagctgcatgacgaacgtatttacctttgttttgtactaacatcaagcaccatctcctcgtacaattgccattggataacgcacaatcgcaccgcctgtacgctcttctaacgggattttatagttagggaacttgtattcttctggatgacgcataatgtccattggaataaggacttcaactacatctggtgagctatcgaatactaagaaacaatcggtatcgccttgaccttgccccttaatatcagatgtaaattcaatacgactgaaccaattttggctacgtaagtattgaagaactgtctgatttgtatattcgttgtactctttttcgagctcttccatcatgtcaggggtaacaacaagtgtatctgcattgtgtccaggtaaacgattaactgcagaacgagctttacgtaaatcagatacgatttctttgcctgttttatcagcccactttgttgaagtaccagctttgttttgatcaattgcaatcgtttggattccttctgcatttgtcacaccaagaatattgtgtttagcatcaccgatccatacaatgcgattctctttttcagcaatggctttacgtgctgtatcagcctttgttgtttcgataggttgacctgccatttgtgcctgacgtaattcctgaacagacacccggaaagcagcagcaacagaatagattttttctgtatggcgctccatgtcagcgtctactaatggaatatcctctgcacctggagctaatactttagcagcaccagaacgcttgataacgtcatagctgtatgtttccgccccagcaggtacatcagtcttcacattgaaaatggtacgagcttttagctcctctttctttgcttcataaatcttattatcaatggactctaaatcaatcggacgaataacaccgtctgctctatattgggacattcttgttcactcctcattcttactagtttttaaggtaaattaatttcaatctgtactaagccacctgcttgagcgcttgacttgaacgctgctgaaggaaaggcaatgactccagaggttgctgtatcagctggacggaaattacttgtagtaggatctacaactactccatcaccaattactacatcttcatcaacctgcacccaaataacacccttacgaactgcagcaacaggatcatattttaaatatttttgatcatcagctttcaatacccaatcatgaatttcttgagctaatgaaacaccataaggtttaccgcctgctttaacgcgtgtaatagtttctccatctgtgcctaattgaacagcaactccgtaaggaatatcttcagctgctgcttttgtatctgcactataatcttgataattggcaagcttacctttaccgcctgctgctggcatatatttgtcataacttgtaatagccatctatatagcctcctattttcatattttgatgttttatttcatgtttaggcgtttatttttcatctcttcaatctgcttattagatgaactaccgtcaccagtaaacatgtgattattgcctgttgacgaaaaaccctcttgcttggcacgacctaaagttgcatcaaaaaaggcgtcaatataatcatctgatttaccgtcgcctttaaagtcaggttttgctttttgaataactgcttctttgatttcacgctctgatttgcctttaaaatcaaaagaatcaccaaggaatgttgttgcaccactgattaactcaacgcgagattgtacttttgcatctagttcatcagcagataaattgttttcctttgcttgttttaaacccttctcagcattttggtacttcacttctagtgcatcatagcgaccttgtaatgtatcaaagtcctttgcttttaggttagccgtatctaagcgtgcttgctgtgcatccaaaaaagatttaacagttgaatctacttcatactccttgccatcaattgtatatttggccatattaacatctccttttccttcgcttgaatcaatttgataggctgctgaatcaccacgaatggatacttctggacccacacgcccttcatcaacaatcgcaacatgattgacttcagtatttcgttgaacaaaatcatattgtttgccgtcatatgtacccttttctggtaccacatcggctaaaaaaccaaggctaatctcacgtttaccgtccttaatcttttgaattaatccagcatccgtcacagtaaatgagatatagagtttaaaatcttctactctcgcgtcattgtgagttaatcccttggaatacgtgttatagttctgcaaagtaacaggctcattaggatgatcatctgttacaggttttgcatgcgctgaaaacatagtacggtcactgaaaatttcttcaggaagcttagcttcaagttgtaccgagccatcttgtcgcatgtatgggaatactcctgggcgagtaataggtgctcgaacagtcaggtacccttcatttgtttcgttatagtcttttataaatgtacgatcataacgctcgtgcttcacacattatcacccccttccagatataaaaatagccctatccttcatgcaagaacttgtgcgggtcaattcctgtattaacttcttcattttcatcctttggtggaatggtgttttgtactagcttttttaaagatttatcaatactatctagtgatttcgcaatagattcaagatttctactgtcctttttatccaatacaatcactcctcatcgaatacaggaatagcaacacaacgacatcggtaatcttcacctggtaaacccacgcttggtggatctgcataagagaaaactttattactcaaatctctgtgtgtttttcgcaccttttcgtcattggatgttagccatttgaacttcgatacacccatttgcttatgacgttttgcagtcatttgaccgagtatagaacctgtttgatcaacagcaataaattcagctcgcttcctggacatccccacgcgttcaactaactgatctctcaccttttttgcgctactgccattcttcacaccttgataaatgatgctctcaatgttagccaggtacccatccttaatgttagtaatatagctggcattctcgcttattgatgttttcataaacgactctaaccaaggctcactaacggtggggtcaattcccttcaccttgccttggttgctaatattatttttattaaataagttcagagagttaacaaacttactggctgtttcctggactacactcgaattaaaaatacctagtgataatcctttgattacatccacagctcgttgaataacatcgagtggagcatctaacttgtagagagaattgtcatccctactcttttgcaacttaatctgaggtgttatttgctcgtcatagacgcttaaagtaattttacctaactcagatattagtttgttaatagaacggctgtatgagactgctacgctgtcagggaaacgtgtaggaggaattatcctagccatatcactgactctccttataagctgtgtaaacttctttagccattcgttcccaatcagcatcgtcaccactgtacttagtttcattcgttaaaccgaattgaccaaagcgtgcttctcgtacatcgtcagatgtatgaacaccattgacgatgtaaatgttatctgtttcagcagttaatttacgaatctcagcatctgtttttgagtcaacattccacaatggattaaacttgatctcccattctactgagtcagggttgatagtgccccctaattcatcagaacatagcaataataagcgaataagacgctcaatatggggctttaattcattctcttgctgtgctgcaatacgagaataatagttcatgacatcatactgagctcccgcaattgtccctgcttcctgccctttaataactgttttaggcattcgtgctgcacctgcaagcatatcccatacataatcaagtaaatccttaatacctgtggtgacagtactctgtttcgttaactcctcatcttttccgataagagcaagagcttcagttcgaaacataaaatccatcagtgtacttaattctcgtttatcttctttgcccatcccctcaatatcagctgatttatagaccttgaaagtaaagtcatatagcatctgaccaactgaccaaagggacgtatcaagaactgtgatgatgtcatataagggttccaataatggttgccctctgtattcgtcctccagccttcttgtctggtcatggataacacgagaagcatgtacacgatcttgagtaggtcctgcaatttcttgcccaacgcgagaacgacggtttaactggaacgactccacttggccatacttaggatggaacatatcttcattcaataaaaattcgtataccttcatgccactgaatgcatggatataatcaatacgcattaattctttttcctctataggatcgcttagttcgaatggattcttttgggtaacacctaaagaaataaagccatcaccccgtaatcgctcatatgaacgcatcttcttaaaagcttctctggcattaagatcagcaagcttgctcataatatcgcgctgtaacttttcatctttcattcgtaaagtgaaccagctgcgcgtcatatcttctgcaggaatatcaatgacgttttgaataatacgattatctgcatataaacgtgttaaatcttgattagttaatacacgtcttagccctggtgtttgtcgagttaatgcatccctgctatttccctttccaggtgcttgcatgaaatcattacgaaactgctttgcttgctcaattacactcatctactcacctccccattaatttcttatagcggtctaaaggatttcccttagatccttgtaacttaactaacgcttgcgttaaactatcgaccatatcatcatgcttaccattcgggaatgctgttgcttcatcaatcagttcattaatccaaggcgcatataacggatgtggtaagtacacgttgcctgattctacttctggagaaacagcattggcgcgtacttcttttccaccttccggattaacaggaattaatccactgatttcatcctgtagcatttgaataacagcaggaccattcgctttatcctcaacgtattttgctttagcgttcggccacttagctgtcatgttacgaatagctttcattgtttcaggtagattcaaacgatcacgtatttgatcaagtagataagagttagcctgtcgcttgccccatacttgcccaacaacaaagtcagaagcactgctatctttaaacgtacagtcccatgattgaacctgtttatctaacattttaggaagaacagctacttctttaggaagctttaatttagctcttatttcttcagtaggcacatagaacttccaccaatgtttactaaagatgctaccacctgcaggtgatggacgttgctggaataaagatgcccaggtacgtgaaccaacttcagactttttatcctctgcccactgttcatcaaaccctaattctggacataacgcctcgccaatttcacgaccaagtagatcatcttcatcctctgcaatagcaggtaaacgcagcctaacccagttacgtggacttctatccaataagcggccaataatgtcatcttcatgccatctagtcataatgacaataacagatgccccattatgtaaacgagtagacaatgtactttcccactcatcccatatgttatctcgaatcgtttgagaagcagcttctttagcattcttgatagggtcatcgataatcattaagtcagcaccttgaccggtaatagaacccccaataccagttgcgatcatgccgcctgtatgcccttcgactccccagtttttagtagcagagttagagtctgatattcgtatattaaataaagcaggagcaaactctttaaatttatttctgttcactcgaccaaacttggttgctaacccatcagaataagcagctgttataacacgcttatttggatttttggcaataaaaaaagacgggaacgtttctgtaaccgtcatggatttaccgtgtcgtgggggcatttcaataataataaaacgctgttcaccatcaacaataggctggagttcattgcatattagttcagtatgcctgaaatgcttatattgcccgtgatggacatattcaacataatctttatacgagcgtcttgccaattcttcttgagcaagttgagcgatgatcttacgttgttcctcacttatcttttgcaaggcttctcaactcctcaatagagaggctggacaaatcaagagtgctttttacatttccactcacttcaagtttatctgttgatttataacctccacgatcaagtatgtcatgcaatatactttttctcatagacatgattttttcccatgcggctggtttgattagatacttatataatcgctctatttcacggtatcgagcatctttatcttttttcaaaggctttagctcttgttcaagaacctcaatatcttcttctaacttagaaacaagagtcgcattctctttcttagaagcttctcttttcctttgattaagtgtagatatttgctcgttaagttcctgaatttcgggaagaatatcattattatctcgctcaagtgtgtctatttgttcaacagcttgctcatgatctgctatcttcttatcaatagcatctaactgcttccacaattcagcgtagaccttattgctatcctccgacattctttcgcgcaatcgcttcatctcagcatcaatttttttagcaaccttagcatttcttagcagcttcgcccctgttactgatgccgtacgttcactatatccagctttaatagccgactgggtggcgttaaatgatataagatattcttctataaataactcttgtttaaagcttaatttagacatttacatagcacctacctcccacatttgtgatattattatcattgctacttggaaatttttaataatcttataggagtgatagcatgttaactggactatctaagcatcttaataagcaaatcgctgtacaaacacaacagacaagctacaaaggaatcttaaaaagcatcgacccagaattaagagtaatagagttagagtgtgggggtaaaacctttttcttaccagtagaaaatatcgaatatattactactgcttaataacatcaaattccaagtacatatcgtatacaaaaaggtactgtttttcagcacctttttgtgtttagttcaactttggttcacttttataggttaactataagttcaacttactttttctcttttatcattgaaacaattgcagaagcacaaaagaaaaacaacacgacaaaccatgttgttagaaaaggatgttcatatattaactccaatataacccctccagatattaatcatggaacacagtaagttcaaatgctgcttcttgttcatcgccctctaattcctctagcttgaaccaattgaatccatcatggttctcatggtaataaggtttatcaaataaaggtgcaaactctttagctaaactttccgcacttgctcttgttgtatcatctttagaaaagttaatttcgatatctgcgcccatttcaactgcttttttcaacatttttaatttttcttcttttgtcatcgattttccctccaaataaaaaagcaccctcgaaaggatgcttaatctttattaaaataaaccattcaaatcaatgaatgacgttgtatgttttattctcgatcatcttcaaagtaaactgtagtgaattcatagaaaaagtctttccatttcttttcaccgtttgtgtattcttgtttaccttcaatggttttcatggtgtattcgacacccagctcccttaaagagcggattagcttttgaatctcattgatataaaagctgttcataatagcatatccattagcaagtaacatacctaatgcccaatcagctctaggctgtgggtttgttgcattagcataagctttatttttgtttacctcgctgtacttcgtctttgcatacataccacttttcatttgtttaattttcacttcacatcactccacatcatatatattaaggtaaatttaacatctccttatgctaattgcttaataaaattaaacccgttctttatcaatcacccgggaggaggccaggattgtagtaacggttgctgtacaaatcgacagacagtagtttcgtgaaggacttgcacacttcactaccccgtggctatcgtacgcaatacagctagactccagttgttcccccgtaaattcagccggcaaccttcatagtcattcgatacacccgagtatacccgttataagggactggtacgtttcccataagcgctatcgcttataagaaaatcttacctttgatggaaaaataaatagtcccctattttgtccctcttttttctgatttttttcggtgttttttctgaaaaaggaaaaagcacttagattattccaagtgctgtagctatacgattcaaagctctgtttctcattgcataatacgtatcttttttcactccaatttcgagataaatttcaatatctttcgttcgttttgatgtaagatatgccttttcgatgattaagagctcttcttgatccaagctgttttttaatgccctatcaatttgtttaacttttaattcattaatgtgacgagaattacgaatagatgggaataattccagacctgtacgttcgcactcttctttattttccacctggacctttagagctctatattcttttaactctttaattacgatttttcgtactaatttttcatctactggttcaagtaaggttaattgttcagctaccatcatttaacctccttttgaattggcttatctgctacaaatccatatccttttacacaacgctggaacatacataaaccattttgctgccatacacaaagtttgcaataatccttttctactttaactttcaccgtaatgcccccttataaaataaaaaggacaccaaataagctattgcttactcagtgcccttgcagttcttgctcagagcaaatattaagttttcttattatcaaaacaccaatacacgtataccttaaattcaaatacagtcaaattattaaggttcgctaaatacttaactaacttattgaaagcttctttttccttatctgatctaccttttatccattcaaaaggattaagaaaagcttttgactggtttatcgaagcgtttaaaggcgctaggtttccgctatgtgtacctccatgacctgttgataatgggataaagtggtcaatttctaaattttctttcttgccagtgattgcacacttatggtcaaaatgctccatcatctctttatattcttctactgaccattcagaaaatagccccttagcttttgctatattgacatgaaatttaacagtcaatgcaggtttattcttctttgaatacattctgttgctttttctaaaacgctccctattattgattctgtaacgtttttgataagctcgatgttcttcagaagcccatctctttttttcttttagttgaagcttttctttatgcgtatcctggtactttttccgataagatttaatcttttcttgaacttctggtctgctgttatattctcttttacgttcttttctgcactctttgcattgtgattcaaggccatcttttttagttctattcttcgaaaagaacataatctgtttaatttgtttacaatcggtgcataatttggtttccaccattacaccttccttttcgtctttgtttccaatctatcgactttaccgccaagggtaataactaacgtttctccgtaatccggtagatcatgttcaattaactgaccatctttcactacatacatttttttattgttcatcaaatctatttcagcgatatattttctatcttcattcaccagaaaatacctcctcatgttataatttcaaataggattgctgggaagatgttcctggttaaaaataataaaaggtagtgtataatgaggttaccttttataaaattattttttctacgagacgctcctggcagagcgtcttttttatttggttgcatatccacttactaaaacagctctacttgcaacaaattcaacttttgttatctttgtaacgattaagaatagaccgtcttgttttataccggcccccacctctagctggtgaggatcttcaattacaatactaaacctaacacgcttactcaccgtctcgcctccagctccttagttttgatattccagaaattaatccatgcgcggtctaatttaatagcctttactgccctagtacgttgtttaactgctttccctaaacgtttctttcgctttaatttattcgtcatgaattcatccctttcaatcgcttgttttccttttttagcttagatatttcaccttttaagtacgatatttcttcatttgaatttcctaatggctttttaactgatatgtttaacgactggaacaatcgttttaactttggaacactaactgtttgttggtgatcaaatactttttgcaactcagcttgtgcttccttgtacttcacccttcatccccctaaccaattcaaagaacttgtcctcatccctagtatcaagtgccttattaatgtgataatcgaacagctgcttttctaaatcctcgattagcttgttaactaattcctgctcttcactaggcaaaattatttccgtatcactaggaggctcatagcgagacatatattttgtaataggaatacaagcctcactaccttctacaacctcgccagtaatgactcttgtagcttcaacatgaatgtgttgtggtcttttacaatagctcaagaatttgcaaataacatgtaaaccgactattcgaagttctaatagttcaccaggctttaagtcttgtaaggtcatattgattcacctactaattgaggactttcatggatgttaccaatcacttctgcatagtgtttatttctaaagagaagtaagctgccacaacataattccatatatttgttataacccacctcataattgccgttaattttcattgatccttcaaaaggatggtcgctgatcttaacgatatctccttcataaatctccttgccgtttttatcttttaagcctgtgtactgcacaacagcttttaaactgttatcagcaaacgagtactcttccatatcctcatctgtcacgtaatccactttgccgttatcaaaagagattgtttgtacattaatcatttcttcatattcactaacaccagctaagtgcatgttagaacctaagttatcaagctgtgttttaacaacaagcgctttatatttaatttctctcattttatcccctccaatttgttatccttaactagccattctttcaataacaggcaaaacattttcatctttgagcgtttcatagataaacgttctacctttttgcgtccaataagtatggaccttgctcttttccgaatccacaacatgagtttttgtatgtgtatagcctttatcagcatatttttgatataagagccagcagtcaccttgtttatattgaatgcctaatttatgaagcagcttattaaatgagatagcactcattccgtaatcttttgctatctggctgactgataaaagagactttgtttgcaaaattaaatcgtagtacgtggctttaggttgcagttcttcaatcttttgatccttttgttgattttgaactagaagatgctgtttctccttttgctcttcaatccacttttgcgctcgctggataggatcatcaatcatgtaagaaggagcttgtgttatttttaactttgattccatttcttcaaatttagagacatatgttgcagtgaaaataacacctttccgtccagttaatttgttagcaaccatgtcacaaccttttttcgtcattaggaaatggaggcgaggttttccttgaatatcggtatagtaactttcaataaagaaatcagccggaccaaaattggacttacctaaaatctctaaatagttcttaatatctctaagtaagtgtttatgttctttttctaccatttcagctatttcacggctatcaacaagaagttgtccattttgatttaaaacattcaatttaaacattctttacctcctcatgtcctattaataattagaagcagcgctagtttttttcagttttataaaggtctttatgagcataaaatacgatatcttttggcaatattagttcgcatgattgaccaactaatatccctctgtctattcctgataaagacaaatagttttgtatttgttctaagtgttttggagtgatttttcctgttttacactccacgatatactgttcaccctttttagaaatcaaaaggtctgctcgtaatttgccgataggatgctcttccttttcaagtacaaattctgctccaaaaaaccgtgcaatattgttacataaccatttcttaagtgaatgctcgtaattagaatttctttcaatctccttgtcccagataattcgaaagaagcaaagctcgtacgtaaaccataagaattcatcttttatttccaaagcaaggagagttttttttatgaatctatgaattgcctttttttcttcaattgagtaatcttcttctactaagaagaacagctgctttaagctaattaactcttcatcactggataaactaattgaaagtgcttcagaaatatccttagcaacaaaccaatcttctttttccatatttattgtcctaatggtgctatctccatatttaagcgttctgtaatcttccaaaatccctattcctcctttagataaaatcgaagattgacgtttgaccctcttgctccatttgcctaaaatggttcttttctttcttttgaggcttttctgctttaggtttattttcaatgagagtcaactgtggcttatcatattgtttaatttccttctcagcacgtttatccaactcagttaccttttccttaacctcattcaaatcagattgtttgggccttttcgtacgccttacaacatcagataaggtgaaagtgcgaaaatgtgatactgggaagcagcctctaaatttatcatcttcataaagatagtaatgagtgctcttattttgctttgtaggctttgctgtaaagcactcaccaatttttagtgttgaatgaccatgtatcactttaattaactcaactgtaagatactcagcatctacaggctgctttactccctcttcttgaggtttgacctcagcatgattaaaacggcacattttatgaccatctgcatccggcttgtccagttcaacctgtattagatagtaagattcattgctaatgtgaataatttttcctgctccagtcatgaattgactgaacacatctactgacattccgacttctaacacgaataagtcaccttcctatacgcgtctatataaatcctcaagttcagttaaagtaagttcgtagagctgccgttcgttcgaatctttatagacgtttttttgaataagagcattaattaaactctttcttttttcctctacacgctttctaagctccatttagtacctcccatctgttatccagcttgtttatgtaagatttcctgttgttgttcaaaagctgtgatacgttgttcaaataaattcatcgaaatattgaaataattaatgtcatccgtaccctcttggatgcattgtgagcaaagttgaacttccatcatgctgaccgataataggtcaacccttgttctcccattacataattcacacactgtgaatcccccttttatctatataaaagcgactgcaaatcttcattttcttgctgagctaaatagcttcgtatcttttcatccggcatataaatgggaaatgccatcttttcaatccgactacttacacgaccttctttgtatttgatgtccagatcatcaattgaaagattagacgtaaacaaagttacttttttgttgcttaagcgataatccataattccggaaaacttctcttctacgaagcttgttactttttcaaccccaatatcatctaaagccaaaatatctacgtttttaatggtttcgattaagtcagatgtcttaactttgctgtcatcgctgaaagtctttttgatatcatcaagtaaatcaattgttggagagaataatatacttaatggttcaccaggtttgtcatagactgctgttaaagcatttacaatactagccattagtcttgttttacctgaaccttttgtttcactgtatagatacaatccttttccttgttcttgcatttggttaaagttttggacaaaattagctgatgctcgcttcgcaatggctgcacgttcttttccctgttgctttttgtataagttaatgtcaaaggatgaaatagtagcttgtacaaactcttcaggaatacgagcttttaacagcttcttcttcacagctttatccgatcggcaaggacaaggattcatgaattccctactttctttccaatcctttaccaaatactgacctgtcccatcgcatttttgatacgggcattcctcagaaatcgacgtaagtatctcgtatctcccctgtgacaagtcctttttcttgtgcgattctctcaaggcgttgagtctcttctgaaattccggacgctccttggctagtgtttgtaatgacttctttaggcttatcatttttctccctccttgattgattctgcaaattccttgcatcttctaaggtgcgaacacccttattgtgccaatctactaatataggttggacgtaaccccagaaggcttttttctttctaatggctagtttcatagctgctatcacaacatcttcatttccattaaaatcatctacccagttgccaatatcctgggccattttgggtgataaagatccaccaaaggttgtttcaaaaaaagtaaatacgttattcttttccatcgttggttgctgcggcttttcaggagcctcatttttagatttttgatagcttgctaggttttgatattcatcgtagtttaaaacggtaataaggatacctttgttcttcggtaaggtttcttttaagatatagaaatctttttctaatcttttaattgattctttaataacatccctgttgaccttaagttcttgagctagttgtgtgatagttatttttagttgtccacgttgtaaataactatctgaagcaaagtttgcttcttctaagaaaacgctatataaagccttgtcaaatctatttttaaaagctagccggggctggatgacaaaccccgttgttacttgactcatgccccgtattcactcctttaggtgttatttcttaacgcagattacatagtatttttcaattcggaccattttcagatccggatggtatagattaagaaagccttgaatataaccttcatattgctctttgctttttgctaaaaatttataacagtgaggaaatgctatacgttcttccatataatcacccaatcaactcagcaaagtggataattgaatctaatttctttgttgctctacaatacttacacttaccacagcttttgggcttttccccaccatgctttacttgaagaatacggtctagatttttctcgacttcctcaagttcaacttgcatgataccctcgtccatgttgatgactgctttatcaggtggatcttccttagatatgccaacgattaaaggctctaaccaatcctggcgacctgtaaaacgcttttcgatttcagcatacaaagccatttgagtgatatagccgtatgcttctacaaaagagcaatatcctaattcagagtgccaaactttttctctaagggaacgagctgtttttaaatctgcaaatctccctgcttctggattgtagacgtctaacttacctttccaaggaactccgaaaagttcagccgtaataatgacttctttttctccctggagaatgaacatacataaatcatcacttttcaaagccttaatcatgttatctgcttgtttatattgggcatacaactcaccttttcgattaaaaagagagggtgtattctttataaattcttcaaaagccgtttcaccttcaagccaggcatgtacatattgaccgaagagaagggcctctgaagaaggctcttcccatattccattcaattcggccattgttgctgcttcacaagtaagaaactttttatactgtgaattagacatatactgcttgtctatttcgcgactataatagttctggctgttcaaagatagaaggttttttatcattaggatcaccctctttcttatcatcttttacctctgctttttgagcaggctgttctgtcgattccatttgttgttttttaaattcttcttcagcctttgatttagtaggagtacttgtttttaaatcaaagtaatcttcttttttagccattccatctcgtagagaagtataaatacgaccaactttcagataatcatgttctgtaaatgcatcagcattgctaccgatatatttttcaatcatttctttggtaacaccaaaatcttttttaaaaaggctgaaggcatttcttaaccgatcttccaatggctctttgtgtccactgataagcgttttctggcacatatcaacagctacatccacgatgtcgcctggaataactccaaggatgcaagcgcgtaaacgacgagccccctgattagcaactaactcataaatgtcacgaggatctgttagcttattaatacttcctcgtgctttacgttcgtgttttactgtaaacacttttgtttgacgtgtatttgtttcaaggtcccacgcataagccataacagaggattcaccgttcttctgctcaagctccatgattccgtaatcaatatttccccagttctgagctaaagcttcagccaatcggatagaaggaccagaaaccttagaaccacctcttgggtactcgtaaactgcactttcagcaagaagctttcgaccacaagctgttttaattcgttcaaaagcttgatatgtgtcacgagggaactttttagcaattaccatagctgcctgaacttcttgggcttggcggcttaccattgcctccgttgtaacacttgtttctttaggagcttgtacgtaatctgaataatcgttaaccgttgataatccgttcatgaatgtttcctccttgtgttttatgaagtttttttataaaatgtaagtaattcaatttcacaaacatttcacctgaagtctgcacctacccgtgcaggcttctttattctgctgtagtaaatttgaagccgtactcttcttccaagtacttttctaaatcttctttcaagaccacttcaccggtgttatcatctgttacaatttcatcaccgataagaatttcagttccaaaataatcaactccagcatgttcagattgagctatcatatttgcatagcctgtacgatttacttgagtgatttcaggatgttctacatgcatgttattcacctactttctgatgcacctttgcaccgtattaccaatgaatagctagataactagattcataagcactacggcaaaaaggttggaaaccttcatgccctgtgatatactatttatagatctttggttgttctaacagacggacagtttgctatcctaattagctaactgtctttttatttgcccacatattttgccgaatcttacgttcgatatctaacaacaaaactggtctacccttcaaatttttacaccacttgctaacttcactggctttcatcattggcatcttatacataacttgtcgcctccttttgtttgaggtaacgcggcacgatatcaacatcaaagcctttacttttcatatccactataattcgttcaacacggcttaaggattgcttttggatttccctagctgcaagtactgtgttaaatgcttcttcttgcaactcttccatatcggcatttaaatcaatagattcaatgactgcccatccggattcttctaactctcttgctcgttcacagatatttaaagcttgtgcattcatctaattcatccccttactgacatatccgttagaaactaatttactagtatgctcatcccacaattcattccagctgtatccgtattcttcgcaactaacagcaacaagatgactagcagctacaattacgtctatcgcttcaagaagagactttttcaaatcctgcaattcgtaggctgccaataatttcggatgctttacaaaaggagcatttttaattgaggtaacagcctcatccaactcctccaacgttttaaggacaacactacttcggttaagctctgcaaactctccatctaatttccggacccaggcaccacccgtatacttattagcgatattaattgcgaaccaaggatcgtcgtacttttccatcaccctttgtgctatatccaccggaagcttagtgcgttctgtttcataagccgaaactgcttccctagaaagattaagttccaacgctagttgttgctgtgaatcaggcttccttagctctttcaaatgtttaccaatattcatttgtacatctccactctttaccattatttagttttatttgatttaaaatgaaattaataagataactgattgctagagaacctccgatttttctttctgagccttttcagcctcagctctttctttttctcgagcagccataatacgtgggacagaagttcttgcgaaaaattcaagcatattacgaacagcttccttagaaggttgtttcatttctgatggtttcaccggttattccccctttgattagtcgttccataaccgataccacgttgaacgtgatatcgagtgactgatgaagtttcgaatgccacctttacgcttaattgatttgattgattctcgaagtaaatgaatacctaaccctaaaacgaatatgttaaatattgtgactgcgaaccaggtttgaaacacttttgcccaatccataggcaatcagctccttttgaatatttgttaacctagctggtgtttatcaatgatttttaatatcgctgtaatagcatcttttttctcataacccggatcagttactaaattaaaagcaattgctagaagatccgttttcagctccgaaaggaaaaatgtttccgaaagtttttcgatgtctttcatgatgaaagtcccccctacacctctctatgtggtaatattttcatagattggaggtgattatatgaaatggattcctgaacgcccaattcaatctacccttgaacctagattgaatatcaataatcaaaaatcagatctggcattagactttggtgaagacggtgctgatcttttagttgaaaatggcgatcttaaaatggtttctggtaaagatgcttttatccaacaagttaaaactgttttattaactaccagaaccgagtttttcacttttggcttaaaacatttactgccaagatcttcagaacaaaatcaatttaatgaggaatgcctactgttagctgaaagccttgtttctgaccaagattcagaatctacgcctagtgatcctagtggattgggctatacgctagaaactattgaatctatcgaatacacggattctaaacttaagataactatgactgtaacgggattagacgaaaagcttactattgatgtctacgcccctcttgcaaaccgagcgtaataactttcgcaatagtgtagattactgaatctttctttttatcgaaagtatcagggaaaaaagagagaattttttctagtgatatgtctgaattgttgagagccgccgttgccgcggtggctttctcttcaagttgggtaacacgattttcaagctcaattactttttgttctaagttcactttcatcgcctcctaggttagtgttgataaattcttcgattcgtatattttatcttcaaaaaaattttcaactggttcatctaatatttctgcgatttgtttaattagttctacataaattttgcgtcttcctaactcatagctgttgtaagtttgagttggtatatcaagcttttcggctacagtaacttgggtaagacctttaagttttcgaatgtgtctaactcgctcgttaactttcaaattaacacctccttatatacgaatcgaagaacttgtaactcaataataattcttcgattcgtatatgtcaacaaaaaaatatactttttgaagattttttttactcaattcgtataatattgtacaattcgtatatataaatataagtttggagggcttcgtatggctcttggagacagaatgagaagcttacgtgagagcaaagaactcactcaaaaacaactagcagacaagctaggaattcctaatcaaaatgtctcaaattacgaacgtgggttcagacaacctgattatgatacattgcaaaaaatcgcgagttttttcgaggtatctattgactatctgattacaggtaatgaataccgtgtatctagcgatgaaatgtggaaagaactccttgatcctaagacagagttattctttaaggatttaaaaagtgctcctgaagaaaagattgaagagttaattcgtttttgggaattcattaacgaacgagataaataatcccccttcttcttctagttataatgttgttattgttgttaatgatgttataaataaaagttgggggtaccttggggaaaggttggggaaaccttgtgtgtaccttggggaaaccttaaaaactacaccatttgagccttagagccacaagggattcagaatcttccctgttggggaaaccttagggataccttggggaaaggttgggggtaccttgggggtattttaggcactttacatcactataaattcacgcgacacgatttaatacgtgtcttttatttcacttgttagtgggaaatattcctttatcttttaattacagggatatacacaggcacattttaataggctatcggttttggaggagtactaatgacatatcacacatctttattagaggactggattgaacaactttatcagcagattggaatatatcatcctgaacaacttgattatcacatcatcgccaagaaactaaacataaagttaaagttcacagatatgtctagccgtctttttaaaggttctatcatccttgatagtagactcactccagaagagcaatttgaagattttgctcatgaagcatgtcatactcttagacacgcgggcaatcatatgattattaacgatctttttctggatcttcaagaattccaagcgaaacatttcgtgtttcacttttgtgtacctacttttatgctaagaaatctaaatttttataaatctcgtaaagaaacgatctacttaattgctaatacttttggagttactacccaattagcagagaagcgacttgagttgtatgaaaataagataaattatcaaaagttattagatattaataaagtcagagcttaatggttttggtgttaaaggctttcggcctctatacataaatattttataaaagggagtaagacgtatgaagaaattttttaaaattggctgtctggggttcatcgtgcttgtggctattattattgttattgcagtagcttcaggtggtaacgatgatagcagtaaaaatacaagttctggtggagacagcaaacaagaagcgaaaaagagcagttatactatgggtcaagaagttaaggttggaaagatgaattatacagtaaacgataaatcaactgctgatcaagttggtccatcatctttacctgagaaagctagtcagaaattccttgtaattgatgtaaaagttaaaaacaatggtaacgaagcagtaatggttgactctagcttcttcaaactaaaacgcggtggaaagacatatgaagcagatgctgcggctagtctttctgcaaaccaaggtgaagatggaaatattacaaacagctttatggcacaagacttaaatccagactctgaaatgagtggtaaggtagtatttgatgttactccagaaattgctgaagctacagatttacaattacaagttcaaactggtgctttcggtacagaaacagagttaattaatcttaagtaataaatatttatagaaaagctcttttgggagggcttttcttttgactcaacatacgaacatacattcttaaaaaggagctgtttcactatgacaattgttagcgaccgactaaaagagctaagaaaatctaaaggtttatccattcaggaggctgctcgtaaggccaacatattcaaaaagagaattgaagagtatgaagctaatataaaagttcctgactatggtcatgctaggagtctagctgattgttatcatgtaacgctttgctatttagttgggcatacggatgatccaacagaggttgttgatgtatctcacaaatctaacaaatacgcggttctaaaagatgaagatttctctgaagaagatgaatttcttatgcgtcgtagtttgagtgaagttgtacattacatggaatggtataaaaacgagaagaaatagcttatattattaatatttttttaaagagaggatgattattatgcgtacagcagtatatgttcgtgtatctacagaggaacaagcaaaagaaggttattctattcgcgctcaaacagagcgtctaaaagcgtactgtctctctcaaggatgggagatagttgacttctatatcgatgatggacaaagtgctaaagatatggaacgtacgaacctaaaaaggatgattcagcatattgaacaaggattaattgaatgtgtcctggtatataagttagaccggttaactcgctctgttttagatttgtacaagctacttgaaatattcgatgctcatggttgtaaattcaaatcagctactgaggtctacgatactactacagctatggggcgcatgttcattacaattgtagctgctcttgcccaatgggagcgtgaaaacctaagtgaacgtgtaagaatgggaatggagcaaaaagcccgtgaaggtcaatgggttattaatatggccccttttggatatgagttagataaaaagaataaaagtttgataatcaatgataaagaggctgctatcgtcactcgaatctttaatatgtacttgtcaggtaagggaatgaaaaaaatcgctacagaattgaatgctgtcaacattcctactaaaaccggaaaaacttggtctgataacaaaattggttacatcttaaagaatcctacttatgttggtactatccgttataattatcgtgtacacaatgatcaatattttgaggtagaaaatgcagtgccagcaatcattgatcgtgttacgtttgaaaaagtacaaagtgtagctacagcaaggaaaaaagttcaccctaaagcagctacaagtgaatttatattttctggcaccataaagtgtgccaaatgtggagctcccttttctggcaagtatgggtactccaaacgtggcgaaaaaattcatcgccctcgctcttattattgttcaaagcaaattttaggattatgtacacagcgtaatatatcagaacgtttcattgagcatcattttcttaaatatttacaagatatcgagattgatcaggatcaaattaaaaatgtggaacctaccaatgaacaaaaagatattcaacaacaaattatgcttttagaaaaagacttgcgtgcaattgagcaacgtcgaaaaaagtggcaatacgcctgggttaataatatgattgatgatgatgattttgcagcacgtatggaagaggaaaatcaaacggaagtaaaaatccaagaagaattaaataatattcagcctgtagctaattcaatggatcctgttgaatttaaaaccattttaaaagatattcgtacaaactggaattctctaacggccattgagaaaaagatgatgttgcaaatgttagtcaaaaaaatggtggtcgataagattagtccaaaaccaaaagttgatagtgtagaaatcgtcgaaatcgaatttaactaggcgatttcttaacgtgcattgtcctattatcaaaacagaatgtgtatggctccacaggtaggactcgaacctacgaccgatcggttaacagccgatagctctaccactgagctactgtggaatatggtgggcctaagtggactcgaaccaccgacctcacgcttatcaggcgtgcgctctaaccagctgagctataggcccttcatttggagcgggtgatgagaatcgaactcacgacatcagcttggaaggctgaggttttaccactaaactacacccgcgttacttaagatggggcgactgatgggaatcgaacccacgaatgccggaaccacaatccggtgcgttaaccacttcgccacaatcgccgtcttaaaatggtggctcgggacggaatcgaaccgccgacacaaggattttcagtcctttgctctaccaactgagctaccgagccaaacaaaatggcggtcccgacgggaatcgaacccgcgatctcctgcgtgacaggcaggcatgttaaccgctacaccacgggaccactttggttgcggggacaggatttgaacctgcgaccttcgggttatgagcccgacgagctaccgaactgctccaccccgcgatgatatgaaatgatataaataaatggcggaggaagagggattcgaacccccgcgggctttaacacccctgtcggttttcaagaccgatcccttcagccggacttgggtattcctccgtatatttataacaaatgtaacttatatggtagcggcggagggagtcgaacccacgacctcacgggtatgaaccgtacgctctagccagctgagctacaccgccatattattcgttacaattatttaatttaattggtggagcctagcgggatcgaaccgctgacctcctgcgtgcaaggcaggcgctctcccagctgagctaaggccccataaatggtcgggaagacaggattcgaacctgcgaccccttggtcccaaaccaagtgctctaccaagctgagctacttcccgtttatggcgcgcccgagaggagtcgaacccctaaccttttgatccgtagtcaaacgctctatccaattgagctacgggcgcttnnnnnnnnnnnnnnnnnnnnnnnnnnnnnnnnnnnnnnnnnnnnnnnnnnnnnnnnnnnnnnnnnnnnnnnnnnnnnnnnnnnnnnnnnnnnnnnnnnnntctagcgcgtctgccaattccgccacacccgcgtgtgaatataaatggtgagccatgaaggactcgaaccttcgaccctctgattaaaagtcagatgctctaccaactgagctaatggctcgaaaaaaatggtgccggcaagaggacttgaacccccaacctactgattacaagtcagttgctctaccaattgagctacaccggcgtgcaatctctgacttaaatagtcgatggtggaggatgacgggatcgaaccgccgaccccctgcttgtaaggcaggtgctctcccagctgagctaatcctccgatatataagcctggcaacgtcctactctcacagggacaaagtcccaactnnnnnnnnnnnnnnnnnnnnnnnnnnnnnnnnnnnnnnnnnnnnnnnnnnnnnnnnnnnnnnnnnnnnnnnnnnnnnnnnnnnnnnnnnnnnnnnnnnnncttggtcccaaaccaagtgctctaccaagctgagctacttcccgtttatggcgcgcccgagaggagtcgaacccctaaccttttgatccgtagtcaaacgctctatccaattgagctacgggcgcttattaaaatggtgccgagggccggacttgaaccggcacggtagtcacctaccgcaggattttaagtcctgtgtgtctgccaattccaccaccccggcaggacttatatatgtggagcggaagacgaggttcgaactcgcgacccccaccttggcaaggtggtgttctaccactgaactacttccgcgcatatatgaaattaataaaagatgcgggtgaagggacttgaacccccacgtcgtaagacactagatcctaagtctagcgcgtctgccaattccgccacacccgcgtgtgaatataaatggtgagccatgaaggactcgaaccttcgaccctctgattaaaagtcagatgctctaccaactgagctaatggctcgaaaaannnnnnnnnnnnnnnnnnnnnnnnnnnnnnnnnnnnnnnnnnnnnnnnnnnnnnnnnnnnnnnnnnnnnnnnnnnnnnnnnnnnnnnnnnnnnnnnnnnnatggtggaggatgacgggatcgaaccgccgaccccctgcttgtaaggcaggtgctctcccagctgagctaatcctccgatatataagcctggcaacgtcctactctcacagggacaaagtcccaactaccattggcgctaaagagcttaacttccgtgttcggtatgggaacgggtgtgacctcttcgctatcgccaccagacatattatatgcaacgtcctactctcacagggacaaagtcccaactaccattggcgctaaagagcttaacttccgtgttcggtatgggaacgggtgtgacctcttcgctatcgccaccagacatattatattatacactatttcataaagaaagcaagactttttttccgaaagatttattctttcaaaactagataacagttcgctgagtaaagcttacgcttttaaagtttggttaagtcctcgatcgattagtatcagtcagctacacatgtcgccacgcttccacctctgacctatcaacctgatcannnnnnnnnnnnnnnnnnnnnnnnnnnnnnnnnnnnnnnnnnnnnnnnnnnnnnnnnnnnnnnnnnnnnnnnnnnnnnnnnnnnnnnnnnnnnnnnnnnntttggttaagtcctcgatcgattagtatcagtcagctacacatgtcgccacgcttccacctctgacctatcaacctgatcatctttcagggatcttactagcttgcgctatgggaaatctcatcttgaggggggcttcatgcttagatgctttcagcacttatcccgtccacacatagctacccagcgatgcctttggcaagacaactggtacaccagcggtgtgtccatcccggtcctctcgtactaaggacagctcctctcaaatttcctacgcccacgacggatagggaccgaactgtctcacgacgttctgaacccagctcgcgtaccgctttaatgggcgaacagcccaacccttgggaccgactacagccccaggatgcgatgagccgacatcgaggtgccaaacctccccgtcgatgtggactcttgggggagataagcctgttatccccggggtagcttttatccgttgagcgatggcccttccatgcggaaccaccggatcactaagcccgactttcgtccctgctcgacttgtaggtctcgcagtcaagctcccttgtgcctttacactctacgaatgatttccaaccattctgagggaacctttgggcgcctccgttacattttaggaggcgaccgccccagtcaaactgcccacctgacactgtctcccggcccgatcagggccgcgggttagaatttcaatacagccagggtagtatcccaccgacgcctccaccgaagctagcgctccggcttctcaggctcctacctatcctgtacaagctgtaccaaaattcaatatcaggctacagtaaagctccacggggtctttccgtcctgtcgcgggtaacctgcatcttcacaggtactataatttcaccgagtctctcgttgagacagtgcccagatcgttacgcctttcgtgcgggtcggaacttacccgacaaggaatttcgctaccttaggaccgttatagttacggccgccgtttactggggcttcgattcagagcttctcccaaaggataacccctcctcttaaccttccagcaccgggcaggcgtcagcccctatacttcgccttgcggcttcgcagagacctgtgtttttgctaaacagtcgcctgggcctattcactgcggctctctcgggctatacaccctaccagagcaccccttctcccgaagttacggggtcattttgccgagttccttaacgagagttctctcgatcttttgctaaacagtcgcctgggcctattcactgcggctctctcgggctatacaccctaccagagcaccccttctcccgaagttacggggtcattttgccgagttccttaacgagagttctctcgatcaccttaggattctctcctcgcctacctgtgtcggtttgcggtacgggcacctcccgcctcgctagaggcttttcttggcagtgtggaatcaggaacttcggtactataattccctcgtcatcacagctcagcctttatgatgagcggatttgcctactcatcagcctaactgcttgaacgcgcatatccagcagcgcgcttaccctatcctactgcgtccccccattactcaaacggcggggaggtggtacaggaatatcaacctgttggccatcgcctacgcttttcagcctcggcttaggtcccgactaaccctgagcggacgagccttcctcaggaaaccttaggcattcggtggacaagattctcacttctattcactgcggctctctcgggctatacaccctaccagagcaccccttctcccgaagttacggggtcattttgccgagttccttaacgagagttctctcgatcaccttaggattctctcctcgcctccctgtgtcggtttgcggtacgggcacctcccgcctcgctagaggcttttcttggcagtgtggaatcaggaacttcggtactataattccctcgtcatcacagctnnnnnnnnnnnnnnnnnnnnnnnnnnnnnnnnnnnnnnnnnnnnnnnnnnnnnnnnnnnnnnnnnnnnnnnnnnnnnnnnnnnnnnnnnnnnnnnnnnnnatacaccctaccagagcaccccttctcccgaagttacggggtcattttgccgagttccttaacgagagttctctcgatcaccttaggattctctcctcgcctacctgtgtcggtttgcggtacgggcccctcccgcctcgctagaggcttttcttggcagtgtggaatcaggaacttcggtactataattccctcgtcatcacagctcagccttaggattctctcctcgcctacctgtgtcggtttgcggtacgggcacctcccgcctcgctagaggcttttcttggcagtgtggaatcaggaacttcggtactataattccctcgtcatcacagctcagctttcatgatgagcggatttnnnnnnnnnnnnnnnnnnnnnnnnnnnnnnnnnnnnnnnnnnnnnnnnnnnnnnnnnnnnnnnnnnnnnnnnnnnnnnnnnnnnnnnnnnnnnnnnnnnnattctctcctcgcctacctgtgtcggtttgcggtacgggcacctcccgcctcgctagaggcttttcttggcagtgtggaatcaggaacttcggtactataattccctcgtcatcacagctcagccttcatgatgagcggatttgcctactcatcagcctaactgcttgnnnnnnnnnnnnnnnnnnnnnnnnnnnnnnnnnnnnnnnnnnnnnnnnnnnnnnnnnnnnnnnnnnnnnnnnnnnnnnnnnnnnnnnnnnnnnnnnnnnncatcacagctcagcctttatgatgagcggatttgcctactcatcagcctaactgcttgaacgcgcatatccagcagcgcgcttaccctatcctactgcgtccccccattactcaaacggcggggagggggtacaggaatatcaacgcgccctttctaacttaaccattagcgaataaatggtacaacatactgttgtgttatttattggtttgattaaagaaaagtttcacttttcctcagcaattactgttatctagttttcaaagaacaatcgcaaccaaaattcttcttattgaataagaagaaagtagtgtgctggtacaggaatatcaacctgttggccatcgcctacgcttttcagcctcggcttaggtcccgactaaccctgagcggacgagccttcctcaggaaaccttaggcattcggtggacaagattctcacttgtctttcgctactcataccggcattctcacttctaagcgctccaccagtccttacggtctgacttcacagcacttagaacgctctcctaccactgacatcaaagatgtcaatccacagcttcggtgatacgtttagccccggtacattttcggcgcagagtcactcgaccagtgagctattacgcactctttaaatggtggctgcttctaagccaacatcctggttgtctaagcaactccacatccttttccacttaacgtatacttggggaccttagctggtggtctgggctgtttcccttttgactacggatcttatcactcgcagtctgactcccatggataagtctttggcattcggagtttgactgaattcggtaacccgttgggggcccctagtccaatcagtgctctacctccaagactctcacaacatgaggctagccctaaagctatttcggagagaaccagctatctccaggttcgattggaatttctccgctacccacacctcatccccgcacttttcaacgtgcgtgggttcgggcctccattcagtgttacctgaacttcaccctggacatgggtagatcacctggtttcgggtctacaaccacatactaaacgccctattcagactcgctttcgctacggctccgccttatcagcttaaccttgcatgggatcgtaactcgccggttcattctacaaaaggcacgccatcacccgttaacgggctctgactacttgtaggcacacggtttcaggatctctttcactccccttccggggtgcttttcacctttccctcacggtactggttcactatcggtcactaggtagtatttagccttgggagatggtcctcccagcttccgacggaatttcacgtgttccgccgtactcaggatccactcaagagggaacgaagtttcaactacagggttgttaccttcttcgacggacctttccaggtcgcttcatttacttcgttcctttgtaactccgtatagagtgtcctacaaccccaagaggcaagcctcttggtttgggctaattccgtttcgctcgccgctactcaggaaatcgcatttgctttctcttcctccgggtacttagatgtttcagttccccgggtctgccttcaatatcctatgtattcagataaagatactgttccattacgaacagtgggtttccccattcggaaatctccggatcaaagctcacttacagctccccgaagcatatcggtgttagtcccgtccttcatcggctcctagtgccaaggcattcaccgtgcgccctttctaacttaaccattagcgaataaatggtacaacatatgttgtgttatttattggtttgattaaagaaaagtttcacttttcctcagcaattactgttatctagttttcaaagaacaatcgcaaccaaaattcttcttattgaataagaagaaagtagtgtgctttctataattgagagattgaactctcaaaactgaacaaagtcgccctttctaacttaaccattagcgaataaatggtacaacatattgttgtgttatttattggtttgattaaagaaaagtttcacttttcctcagcaattactgttatctagttttcaaagaacaatcgcaaccaaaattcttcttattgaataagaagaaagtagtgtgctnnnnnnnnnnnnnnnnnnnnnnnnnnnnnnnnnnnnnnnnnnnnnnnnnnnnnnnnnnnnnnnnnnnnnnnnnnnnnnnnnnnnnnnnnnnnnnnnnnnntgagagattgaactctcaaaactgaacaaagtatcaaaacgtacgtcatataaaaatccttagaaaggaggtgatccagccgcaccttccgatacggctaccttgttacgacttcaccccaatcatctgtcccaccttaggcggctagctccttacggttactccaccgacttcgggtttcctcagcaattactgttatctagttttcaaagaacaatcgcaaccaaaattcttcttattgaataagaagaaagtagtgtgctttctataattgagagattgaactctcaaaactgaacaaagtgtcaaaacgtacgtcatgtaaaaatccttagaaaggaggtgatccagccgcaccttccgatacggctaccttgttacgacttcaccccaatcatctccgccgctaacgtcatagaagcaagcttctaatcagttcgctcgacttgcatgtattaggcacgccgccagcgttcatcctgagccaggatcaaactctccgaagaaatgtttgacttgctcaatttaaaaaataaaaatcaacgttgacgtttgtcgctttgttcagttttcaaagttcaaccgccgctcttaagcgactttactatcataacaagttgcaacctagttgtcaacaagtttttttatttgtttatcacttcgatgtttgctttagcagttcatcttagcgacatttaataatataccatgcctccttttattgtgcaatagtttttcgatatatttttaaaaactattttcttacaaacgaaacgttcgccaattaatagatactagcatatctagagccacactagcataatgtctattaaatcattatccgccaaggaggcgttcacttggataccttaattgcagctgcactctatttgtccttttgtatgtctattctcttaatttcacttgcttattgggaatcaattcaaatgtctaataaagaaggcaaggtcaacggcctttcatttatttcactttcaacattcagcatgattttttgtttgtttacttcatatttttataccattctttattaacatgcgttgtcttcttataaaaaggagacatttctttattttattacaatattcgcattcagtatacttacttattgaaatcaatgcgataacttcagtcactcctcttcttctatacgtacgatggacagtgaaggaatttgtcgaatgattttttggaacactttctttaaatttgataaactacttttagaaaacgctttcatttatactttaacattattcaaggaggaaaccaaatgaaaccattgcttgaattaacagttggagaacttttaaaagaaagtacaaaaaagtttgggcatcaagaagcggttatctactctgaacaaaatattcgctatacgtacgcggaattttatcaagaaacctctcgagttgcaaaggcacttctagccaccggtctcaaaaaaggcgaccatatcgctatctgggctaccaatgtgccggaatggttgcttcttcaattcgcagcagctagaataggcgctgttttggttacccttaatacaagttatcaatcctctgaattagagtatgtattgagtcattctgatacaacagcgctatttttcattgatgaatttaaaagcacttcttatacgtctattatcactagtattgaacataaccttcccaaactaaaacatcttataaacttaagtggatcaagcgaacatacatcttggaatgagtttttaatgagtagcttaatgatctcggatgaggttctcgataagcatgaacaatccctacatatccatgatgttatcaatatgcaatatacttccggaacaacaggttttccaaaaggagttatgctaagtcaccataatatagtaaacaacggctttttagttgctcagtctatgaaactgactaacgaagaccgcttatgcatcccagttcctttctttcattgctttggatgtgtgctgggtgttctagcatgcgtatctgtaggtgctactatgctaccgattattgaatttcaacctgcctctgttttacgcaccgtagagaacgaaaaatgtacagctcttcacggtgtaccaactatgtttattgcggaattaaatgcacttgagtttaatcaatatgatttatctactcttcgcacaggaattatggctggttctaattgtccagcagaagtaatgaaacgagtcatacatgacatgggcatcaatgaaattacgatcgcgtatggtcaaaccgaaacatctcctgtaatcacccaaacaaccccaactgattctatcgagcggcgagtacaaacggttggcaaagttcataatcatgtacagattcaaattattaatccagttacaggtaaaccagcttctttcggagaacaaggagaactttgtgcaaaaggatatttaacaatgaaagggtattataaaatgccggaagaaacagaaaaaacaattgtaaaagattggctacatacaggagatttagctaccatcgataaggatggctatgtaaaaattacaggacgtctaaaagatatgattattagaggcggagaaaacatttacccaagagagattgaagagtttttatatagaatacccgaggtagaagatgtgcaaattgtcggtattcctgatccaaagtatggagaacgagttgctgcatgcattaaactcaagcaacattcttttcttaccgctcaagaaatcaaagacttttgcaaaggtaagcttgctcatttcaaaattccggaacatatttattttatagacgactttcccatgacggcctccggcaagattcaaaaatataaattgaaagaaaagattgtagcgctttataaataatcagatttttttgaattccacctgttattatgaagaaaagtttactatactaatacatatctgtttttcttctttcatacagatataaacaacaatgtttattgaaataggtgaaaataatggaaaatgaaatgttgcttaaattaggtatttccgctgtacttggtcttattattggaattgaaagggaactaaaacgaaagcctgttggtttaaaaacatctctcgtaatttccattattagctgtttactcacaattgtttcgattgagtcttctcaaatttttaataaaggtgatcatatcacaatggacccgcttcgtctggccgctcaaattgtttctggaattggttttttaggggcgggcgtcattttacgaaaagaaaatgacagcatctcagggcttacaacagcggctattatctggggagcagcaggtataggcattgctgtaggtgcagggttttatcctgaagctattaccggagttgtactgctcattatcagcgttgaacttcttcccttccttattactattttggggcctaggcaactgcgcgagaaagaacttattcttcaactcaagctggcggataagcacaatatctttgatacaactaatagcattagagaaaagaatattacaattaaaaatattcgaatcaaagatttagacaccaatgaattgtatatacgaatgaaagtgtcagttaataaccagcgccctactacagaagtgtattacgaaattcaaaaaatcagcggtattcgaagcattgaagttgaaaatgtataaataaaaaacggccaattggccgttttttatttatatttttcaatctgttgtaaaaattcccgctgttttactagagacagccggtattgatcatcgataatttctgttaataactcatgtttacggctctttgacacattcaatctgtggataagaactctgcattcatacaaaaactgtgtatactgtgtgtaactctcatcataatttgaggataagtcttctttgattcgttttgtcaacaaaggactagcgccatctgtggatattgctagcgataatctccctctagaaaactgtgcagggatttgaatatttccatcggaaaaactgctggccatattaaccaactgatcatttttaatatgctgcttaacaaacttattcacagcttgatcatttgtagccacaacaattaaaaagacattaagtaagtcttcttctcctactttttttctttttacacgcagctgatctttaacttcccattcatttatttcagctgaaacagttggagcaaccactgtaatggctgctccttcttgtaaaaaacctttaattctacgagttgcgattgttccgcccccaactactaagaccgaacgaccctttaaatcaagcataacggtatacatcgtattgatttcctttgctggataataacgtttttacttggtgacttaaaatgtgtgcaagtccatcatgataacctaggtagttggctaagataaactgctgggcatctgttgatagctgctccaattcttccttaatttcgttcattaaaataccggtaaacaaaaggtatggaagaacgaatacttgcttatacgaagttcgtttagcaaggtgcaggccttcttttaaattaggagaagctgcagctaaataacatgtgctcacttctttaaaagcacctttcccttttagcagttgagctatttcgttaaaatctttttttacagcaggatcactgcttcctctgccgaccaacaataccatcgaatcttcatgcttatccacattggtttcattgattctctctagcaagatatcaacaattcgttcgtctacgccgaacggttctccgtacaggacttctacctggggataacgttcatatactttgtgtatttcttcgggtatatcatgctttgcatgcgcagctgttaataacagaagaggcacaattgcaatacgagtagcaccttgttcaatgcatgcttcaaatccttgttcaatagtgggggaagctagttctaggaaacaaacttcttgaatcggtacatctagattttttttacatctttcaataaaagcaactgcctgatcagcgccttcttttacgcggctgccatggcaaacatataaaactgcatccatataatcaacctctttagtaagcttcttgtgcaaacgaatagtaatgctgtccagtcttctcaaaccaatttaatcgatcatgaaaattcacaacttcaccaacgataatcatacttggattttcaatttgttcttctttaacaatatcaacaattgtaccaagagttccagttacagtgcgctggtgcgcacatgttccccagtgaatcaatgcaattggcgtagctgaagtttttccgtgtttcattaactgttggcaaatgtacggtaagttccgcacccccatataaattgcaagagtatctacacctttggctaggctatcccatttgattgcatcatgctcgctatctttacgatgacctgctacaaaagcaaagcttgcgctgtattcccggtgagtgacagggattcctgcataagcagcggctgcgatacctgatgtaattcctggaacaatttcaaatgaaatgccctgctgcacgagagcttctgcttcttcccctccgcgtccaaaaacaaatggatctccgccttttaagcgcgttacaatttttccttttttagcgaattttactaaaaagttgttaattgtttcttgcttgagggtatggtagttcggaagctttccgcagtaaatgatatccgcatcacttttagcatactccagcaggtccttattcactaaacgatcatataagataacatctgcttgttgaattgctttcaacccttttaatgtaattaaatctggatctcccggtcctgcaccgactagatatactttccccatgaatgcctttcacccttccatcatttccacgtctccgcagcgctcccacattttaatttgaattagaacagcggacaaagtccgctgtcatttagataaactttcggttagctaaatattcaataacagtttgtacacattcttctacagactgtgtgcttgtattaattgttaattcagggttagccggtgactcatacggagaatcaattcctgtaaagtcacggatttctccgcttcttgcttttttgtaaaggccttttggatctcttttttcacattcttctaacggacactccacgtatacttccaaaaattcattcccctctaagatctcacgcacttgagctcggtcctcttggaatggagagataaatgctgttagtaccacttgaccgctgtctacaaatagcttagaaacctcaccgatacggcgaatattttctgtacgatcttcagcagaaaaccctagattcttatttaagccgaaacgaacattgtcaccatctaatacatagttgcgaatatttttatcaaaaagcgcttttgccactgcgtttgctacggtagatttacctgaacccgaaagacctgtaaaccataatacaaaactgtgatgattattttgctcgcgtctttcctcttttgtaattccagcatcatgccacgtaatgtttgttgatttactcacttcaaccgctccttattttgaagatactttttgttttgctaatcctttaattaacacttcaattacttctttacggctgaatgtgcttggtggcacttctccgttacgaagcatttcacgtacctttgttccagatagaatcatatgatcttccttgctgtgagggcatgttttcgttgatgccatcgcttcacactttttgcaatagaagctgtgttcaaagaataaaggtgtaattcctaattcatctgctgtaaagttactgaagattttttgtgcatcatatgttccatagtagtcacccacaccagcgtggtcacggcctacaatgaaatgtgtgcatccaaagttttttcgaaccattgcatggaaaatagcttctctaggtccagcatagcgcatcgcagcagggaaaactgctaaagctacacgatcgctaggataatagttctctaaaagtacttcataactttccatacggatatctgctgggatatcatctgactttgtttctcctacgagtggatttaaaaataggccgtctacaatttctaatgccgttttttgaatatattcgtgcgcacggtgaacagggttacgagtttggaatccaacaaccgttttccaaccgcgttcttcaaatgctgctcttgtttcagttggatctaggtaatacttttcaaaacgcgttttaggtgtacgttctacaagtacgattggacctgctacgtatacatttgggcgttccatcattttttttacgccaggatgagcaagttctgctgtgcggtacacgttctccgcttctttttctttatttggcgtatatacttcagaaacttctaaaacaccatacgttacgccgttttgaacaagttttactttgtcgccaatgtttaattctttagcttgctcttctgttacaggaagagtgataggaatactccatactgttccatctgctaaacgcatattttcaacaactgattgataatctttttctcctaaaaatcctgtaattgggctgtaagcaccaattccaattagttctaaatcacttagagccatgttatctacttcgatttcttttgttagtgacgtgtagtcatatgttggttgatataaattaattaattctccaccgtgtgcttgaattgttgtcattttgtaaaatcctccttaaataattaacacaatataataaaaagcacttgaatcacgcagtcattttttctttttccgactgcaagcttgctctttttcttctagtcgctctagctaagcttagaacacctgctgtggcaatacatccgctagctagcactacaaatgaatataagtcgctttcaagtactaatttcacaagaacatatgagattacgagtgaaaatacaggggataccacccaaacctttaacatttgaatgaccacttcgcgctgttctttcgtgaatcccgttttcgctgctcctattccaataatagaagacgtagtgacctgtgtaagcggtactggcaaaccaaacagtgaagcgactgtgacaagagaagcaccagtacccgagataatgcacccttcccctacagaatagcgagtaatttttttcccgtttgtttcaataactcggcctcctagtaaaagagctccgagcgccactgccaatcctcctgctatgacacccgttgtggcatccattaatccagctcctactagaggaccgacagcatttgccacgttattcattccagctgagaaggcttcaaagaatcccgtcgctataactaaaatcgttaaaactcttttccactttccctctgcttcttttttatgcgctctgcgttttatcacttttccaatcaaaaaagcaatgacaaatgaaaccagcggaacaataatccaaaaagacatgacaactaaaagtttttccacatacagagattgataagctacgcctactccaacaactgaaccaaccgttacttcacttgttgatagaggaataccaattaaattcgcgaaaaagagtgacagcgttgcagcagccagaatgataataactaattctactgacagcaatttttcaggtatgatacctgaactgatagtttttaccacctcgccgcctccgataatggctccgagcacaatacctatagcacagatgaacagggctactcttttctttttaatcgcaccggagccgtatgaaacgcccatagctgctgctgcaccacttgctccaatattcattgcaaaaaaaagcgcaatgataaaggcaacatataaaagcatcatttattcagctctttcgtatttaagattcgtgtaatccgcattcaactttttgtgtacctgcccatcttcctgaacgtaaatcgtctacattgtaggcaggtgcggtacagggctcacagccaatacttgggtagccttgatcatgaagtttgttatatggtaaatcatgcttatacacatagcgccaaacttctttccaggaccaatgaattaacgggcagactttcactttcttgaatttctcatctttattaaaataattcgtgttggcacgagattcagactgctcgcgtctcaaaccagaaatccacgcatcataaggagcaagagattcccttagcgggatgatttttcgaatttgacagcataggttaggctgactcttccaaagttcatctccatgtttctcagcttgttctgcaagcgttaaatccggttttttcatacgaatacgcaaatcaggaaagcgttctttaattgcatcaattacttcatatgtttctttaaaatgaacgcccgtatctaaaaagacgatttcagcatcttttttcacttttgaaattaaatcaattaacacgatcccctcgataccaaagcttgatgcgtaaataattgaatctccgtaggtatcatacgcccactgcaatgctgaaagggctccttttgtttcatcttcactgtcgaactctggaaatgtatcactccagttttcgtacgtatataagtctgccattttcttcactccaattcttagttatccgcgttatccaataaaaaaagacggttttacccactagaattggataaaaccgcctctagtgtgtctagtcagcgaaactatttaattcttactttgcttcaacatgctcaaagatttgttttaagtcgggggttacagtcattggtgtccctcctcaaattatcgcttgcgctatatcaaaataaaaagtcttccatattgaaagactgggtaggcaataaattttcaccttatctttcaaaatgatacacactttgctggaattagcaccttgctaagcaggttgccggggttcagcgggccagatccctccaccactcttgataagcattttttaaaaattttagcatatttagaatatttgtcaacattaaaaatcatatatccgataagaaaactatactttaaattcacagaaatatctatacttttatttaaaacaacatatgtaaatttaacccaaatgtgaacgcatcagtttataaaacgctttcttttttctccaactttttatattctcttgctaaataaaacacaaaacctctctataaaattaataagggatttataagctttacggataattcacccacattagcacacattacagataacactgactgacagataggagctatataagatggagagacaaccctttcaattagacgatacaattaaaaataatgtgcgaacatatttacagcagatttcaactgaagcctctaatttaattaaacatttagacacgagtgatcattgtatcctatgtgattttgaggagatgcgaaagttatttcaagatgttcaagctacggctgcctcttattatttgcgtcattatctatcgccttatacatttgaatatgctgctctgtccttagctattcataacctttctgagaaacgtcacggcgctttaattgtcattgaacgggaacaaaatgtagactctcttattcaaaaaggaatccctattcaagctcctgtcagcgctacgctagttgagacgctgttctatccagggacacccttacatgacggagccgtcttgattagaaataatcagcttatctcagctgctaatgttttacctctctcgtctattatttcaacgaccaaaaaattgggaacacgccaccgtgcagccattggaatgtcggaaaaatcggatgcattaattttagttgtatctgaagaaacaggcaaaatttcgtttgctcttgatggaagcctctaccctattcactccagcaaaaatatgatttaagagccctttcctgataagcagccctatcttgacttctatatcctttctctttaatatatttcatagtttttacatactatagatacgggtgatgcatatgacaattttaaaatttgaacatgtaggcgttcaagtaaaggatatagaagaatctattgagttctatacgcaaaaagtgggattagagctcatcgaaacactaccacataccgatccatctttgaagctagcttttctaggtttagaaggcaatgtaatcgtagagttaattcaagggtataactcaagcttacctaacgaaggtaaagttcatcattttgccctggcagtagacggaattgaagaggagtttaagcgtttaaaatcagcaggcgtttcatttgtggaagaaaacattgtaactttgccaaatggagcaagatacttatttttctacggtccagacaaagaatggattgaatattacgaagtaaaaagataaagatatcttatacctgcagtagaaaatggtcatactgtggttatgactaatcactggaggtttttttatgatggaatggctattatttcgactttttcgtcgttctattttagtgcggcttctttttattatcggctgccttgttctgcttttcggcatgcttatacatttcctagagccgcaaacgtttgggaatgtgtttgaaggaatttggtgggttattattacaatttctactatagggtacggtgattttgctccgaccactacgattggaaggttagctgcaattattttagtcctgatcggaacgggatttattactacttattttgttacgctttctaaaattgctgtttccgctgagagcgcttatttggaagggaatttaaaattttatggaaaagatcactttatcgttgttgggtggaatgagcgcgccaaactggtgttagagtcttatcgcgacgcatttcataaagaagacattgttcttatcgacgactctctgactaaaaatcccatgatttgtgatcgcgttcattttattaaaggaagtccctctcattatgaagtattagaacttgccaacgctcggtacgcaaaaaaagtgctgattactgccgatcaacataagacagaagaatatgcagacatgaatacgattgttacgttagtcgctctgcaaggattgaacccttctatttacagcatcgttgaactgttaacaaaaaagcatattcaaaatgcacaaaatttgggggtgaatgaaatgattaaaacaaacgagttgattagtcaagtcatgtacgaacatatttttgtgaaaaaagtagagagtttaaaaaaagaatagttccttcaattactgaagcagcgcatcttctgcctctctaattagctcttctcctaagctgatatacttttctggaaatgaagcgtctgcgtcttggggttctgcaaactgattaaatgaagcactcacatttccattgtgaacatcgtcatctagaccaatttgatatttatgtgaaagtaaaaatggcgtgccaatctgtacggttgttcctttagaatccagctctccattcgtagctgtaaacgggatacgtaaaaattgatagccgacttcatcattcatcttatagtcgaatgaaccatggtcataatcccaattccctccaatgttatacccaagcggcttaagcgttttttctaattcataaagcttgaataatgtgccctctaatcttgaagataattcaatcatgttatccctcctctgttttaacatgtcctttttccagcgttttatcctttatctcaaaagcaaaaaagagattgagatataactaaatgaatccaacctaaagacgaacaaactggataaagtagctcgtataaatcgcttgtgacaccgtgatgtccatgcaaggcttcgctttccgcgggcgggcgctgagccccctcgtcgcttgcgcttttcccgcaggagtctccgccttgccctccaatcaactgctagaaggacctaaacagatgaaactatattcaccataacaaaaaaaacgaaccactaatcaaacatgttgatcaatggttcgtttttcacttgggctaaaatacttttgtaccgccctctttttacttatttcaaacgcttttctaattctgcttttttctcttcaaaaccaggttttccaagaagagcaaacatatttactttgtatgcttctactcccggctgatcgaatgggtttacgcctaataaatagccgctgattgcacatgctttttcgaagaaatatacaacatatccgaacgtatactcatctagcgcaggaatgttcacaactaagtttggaacgcctccatctgtgtgagcaagcattgtaccttggaacgcttttttatttacaaagtcaactgtttcaccagctaagtaatttaatccatctaagtccgctgcatcttcttcaattgttagctcatgacgagaatcttgaacttgtacaattgtttcaaaaatatcacggcgaccttcttgtacatattgacctaaagaatgaagatccgttgagaagttagcagatgaagggtaaatacctttttggtcttttccttcactttcgccaaataactgtttccaccactcagcaaagtattgaagagctggctcatagttaatcagcatttcaattgtttttcctttattataaagcacattacgagctacagcatattgataagctgggttctcttctagctctgatgatgagaatgcttcttgagcatcagctgcccctttcatcatttgttcgatatcaagacccgcagcggcaattggtaataagccaaccgctgttaatactgaataacggccgcctacatcatctggaataacaaatgtttcatagccttcttcgtccgctaatgtttttaatgcgccgcgcgctttatctgttgttgcataaatacgcttgcgtgcttcttctttgccgtatttctcttctaataatttacggaagatacggaaagcaatcgccggttctgttgttgtaccagattttgaaataacattaatagagaaatctttatcttgtaaaacatccattaagtctttcatgtatgttgagctgatgttgttaccagcaaaaataacttgcggagttttacgctgttcttttgataatgtgttatagaatgaatgctgaagcatttcaatagcagcacgagcacctaggtaagatcctccaataccgataacaattaatacatctgaatcagatttaattttttctgcacttttttgaatgcgtgcaaattcttctttgtcatactccgtaggaaggtcgacccatcctaaaaagtcgtttccagcacctgttttctcatgaattgaatggtgagctactttcacggcatcacgtaagtatgtaagttcatgttcaccaaaaaatgataacgcgtttgaataatcaaaacgaacatgtgtcatagtctgttcctccattaaaatatctttatttttcactttatcgaaactgttagctgaattcaagtgaatccacttacaatttgacacaatcattatagtttgttgaaactgcaatcattgtatgtacccttttatttaacgataaattcagttgtgaagtcaactaatgttctttgattacaggacgtaattcatgcacgattacgcaaataataagcaaataaaaaacgactaaggagtggtcttcaatcgttttttatttgcttattgggtggtgcaatatagttcatttcacctatcttcacatattgtctcggtttataagaggcttttaaaagggaagagtctattgatatggaatttccagcttcgtttttagaagtgagcagcatcctgttttcttctttcatttccaagtgattatttagcacaaatccactcatacatagtgcagtaaaaatgagaaaactgatggctatttgtttcctatacatttccatcacctcactcttagagtgacaatttcgcatgatttttatacgtcgaaaaaaatttttttatgttttttttatggattttgtgacgagtttctatttatttaataagccttgaaaattctgctgatactaagaattagcatggatgcatgcataattaaattattatataatcggttacagaattgaatatcacaaggaggtttgtcttttgtcgtggttgcacttggtgattttatcgccttttttattagccttttttgtcccgcttctgtataggaaattccagcgtattcatacagggtggttcgttttgcctcttccacttgtgttgttcatttatttcacacaatatatcagtggtgtttctaaaggggaaaactacctacattcaatgaaatggatacctagtctgggtattaactttgatgcttacgtggatggactcggtcttctattctctctgttaatcaccggaattgggacacttgttattctttactccatttattatctttctaagacaaaagaagcgctgcattcgttttatgtctatttgcttctttttatggggtctatgctaggagttgtattatcagacaatctaatgagcctgtatagcttttgggaattaacaagcctttcatcttttttattgattggttattggtacaaacgggagaaatctcaatacggagccttaaaatctatgcttattaccgtattcggaggactttccctattagcaggaattatgcttttatacgtcatgacaggtactttcagcatacgcgaaattatctcaaacgtagatgtagtcacatcaagtcatctattcattccagctctagtcctcattttattaggggcctttacaaaatctgctcagtttccttttcatatttggctgccagatgcaatggaagctccaaccccagtgagtgcataccttcattcagccacaatggtaaaagcgggaatttatcttttagcaagactcagccctgtttttgctataagcgccacttggttttttgctatttcaattacaggactaattacactgttttggggctcattttcagcagtaaagcagcaagatctgaaagggattttagctttttcaaccattagtcagctcgggatgattatgtcacttataggagtaggtagcgcagctcttcactatgattttttagacgataatatctacttagtagctcttactgcagcggttttccatttgattaaccacgctaccttcaaaggcagtttgtttatggtagtagggattgtcgatcatgaaacaggcacgcgtgacattagaaagttaggcgggttaatgagcttcatgcctgtgacatttaccattgctatcatcgggggattttcaatggcgggtcttcctccttttaatggattcttaagtaaagagatgttttttacaggtatggtaaacgtgacaaaaatggatatgtatagcatgcagacgtggggaattttgctgcctgtcatcgcttggttaggaagtattttcactttcgtctatagtatgatttttgtctttaaaacctttacaggcaaataccagcccgaaaaactagagaagaagccgcatgaagcaccagtaggcatgcttatttcacctgttattttagcatcactggttgttattttcggctttgctcctaacttattagaatcaacccttattgagccaacaatggcctctatcgcacctagcctgctagctgaaggtaaagaatatcaagtgcatattaaattttggcacggctttacgctagaattatttatgacgctaggggtcatcatatttggtgttttgttctttatgacgattcaaaagtggttaaaaatctacccacgattcccttcttctttaacgcttaataacggctataattatggaattaaagggatggaaaaagggtcaacacgtatcatgaaaacattaatgacaggatttattagagactatcttttaatcatttttactttcataggcattttacttctcgtgacgctcttttctcagaatgcctttgcgattgatttaaaagatactgcttctataggcgtttatgaggccatattagcagtcgtaatggttgcagctactattacaactttattagcaaaatcacgcctcacagccattatttctctaggagttgtcgggtatacgctctctttatttttcgtattattccgagctcctgacttagctttgactcaattagtgattgaaactgtatccgtatccctatttttactatgtttctactacttgcccgagtttcggaagcgaaaagtaagggtgaagtttcagctgccaaacttactggttgctcttcttgttggaacgactgttacactgcttggcatatcagcaaacagtacgaaactatttgaatcgatttcacattactttattgaaaacagctatgaaaaagcaggcggcgaaaacatggtgaacgtaatccttgttgacttccgcggatttgatacattatttgaaattaccgtactttgtatagcagctcttgctatctatggcatgattcgtcttcggttaacaaaggaggaagaagagtgaaaaaaaatgatttgatactacaaaccacaacgaaagtagtcacgtttattattatcatttttgccattcatcttttctttgcaggtcattatacaccggggggagggtttgttggaggacttactacctcagcagctcttgtattactactgctggctttcgatataaaaaccgtatcgaaagtcatcccatttgattataagaaggtcgcggcttccggactgctgctagctattttaaccgggcttgggtcatttattttcaaagtcccatttctaactcacacatatagctactttaaccttccccttctcgggaaaacatctttagctaccgttgtactgtttgatctaggtgtatatctagtagttgttggtgttacgatgaccattattcaaacgattggagagagtgaatagtggaaatattaatgtccatagtggcagggattctattcactgccgctgtatatctcatgttatcccgcagtttactgcgaattattattggaacaggcttattaagccacggtgttcacctgttaattttaacgatgggcggattaaaaggggggagtgttccccttctgggagaaaaggcttcttcttatacagatcctttacctcaagctctaattttaactgccattgtcataagctttggcgtcacttcttttttccttgtactagcgtacagggcttatcaagaactcggaacagacgatatggacaagttaaggggaaatgaacatgacgagtaattttgtaatcatcccactgcttatcccgtttgttgtaggtgttgtgctcatttttttcaaagacaatattaaacttcaaaggataatcagtgttttatcattaatcaccaccactgcttttgctgcctatttagtacagttggttcaatcaaaaggagttttaactcacgagctagggaactggaaacctccttttggaattattctagtagcggacatgttcgcttcccttctcgtacttactgctagtatcgtaacactatgctgcgttctttttgcttttcatacaattggcgagagacgtgaacgcttttacttttattcatttgtgcagtttttattagtaggcgtatttggcgccttcttgacaggtgatatctttaacttatttgtcttttttgaagtcatgcttatgtcttcatacgctcttattgtaattgggggtacaaaagcacagcttcgagagtctcttaagtatattttagtcaatgtcatttcatccgctttgtttgtaattgctgttgcttatttgtacgccgtaacaggaactctcaacatggcagacctttcgcaacgaattgcagaggctaaccagccgggaattttaacaaccattggcatgcttttatttattgtatttgcattaaaagcagctttatttccaatgtatttctggcttccaggttcgtacagtgcacctccacccgttattatcggattatttggtgcgttgctaacaaaagtaggagtttactctattttcaggactttcactttactgttttatcaccatcctgaattcactcatcaaattatcggttacgttgcgcttttgactatcgttgttggtgcagtaggcgccattgcttattcagatgtgaataaaattttaatttataacattattattgctgtcggagtcattgtctacggtgtaactttaacaacaaaagcaggttttgaaggagccatttattatttaattcacgacatgattattaaagcagctctcttccttcttgctggaagcatcattcgaataactggaacaacaaaattaaagaaaatgggcgggttaattaaagactatccgctgcttggctggatgttttttatcgctactatttcgttggcaggaattcctcccctaagcggctttattggaaaattccttttagttcaaggcggtttagaatcagagagctacacgtttgtaggagttttactagcttcaagcctgctcgttttatattctgccattaagattttcatgagctgcttctggggtgaacctacgctttcttctgagcatgaaaaagtatctcttaaaggtattctatacccatccgctatcttacttgctgtttctgtctttttaggactaggtgcagaagctgttattccttatgtgtcgacagccgctcaaacgcttatggatccttcaatttatatccaatcggtgttaaaggagtagatctgcatgtcatttcaactattattaaacgtaatcattgcattcacatggatgtttttgagagggatttggacactaccttcttttattataggatttttctggggagcggtactgctgtttgttttccgccgtttttttcacagacgtttttacttgcataaagtgtatgcgatcattaagctgctgtttattttcatacgagaattattcaaagccaatattgcagttactaaagacgtattgcgccctaaattaaatattcagccagccatctttgcaatgccaacccgtctggagagtgaatgggaaattaccattctttctcttttaattacgctaacgccaggcacactagtaatggatgtatcagatgataattctactatctatattcatgcaatcaatacagacgatattgatgacattattacagatattcagcaaacattcgaaaaagctattatggaggtgagtcgttaaatgctcgatatttttttaaacgtttcgctcattctcatttctgcttcaactattgggtttgtttaccgagtggtaaaaggtccgtcaaccgctgatcgagcaatggcccttgatgctattggaattaacatcattgctatcacggccatcatctcgattatctttcgaacccaggcttttttcgaagtcattttactgctaggcatcatagcctttgtaggtaccgttgctttttctaagtttttagagaaaggagaagtgattgaatatgaacgtgattagtgaaatcattgtaggagctttggtactaatagggtctcttctgacagtggtgaccatgattgggcttattcgcttgcctgatacgtatacaagaagtcacgctgcctccaaaagtgctaccttaggcgtcctgtttatattagtgggctgcttactctacttttggattgacactggccatattagtgcacggttaattttagcgattgtctttgtgtttatcacctctcctattgctggacatttactaggaagagcggcttattacagcagagttcccctttctgataaaaccgttcgggatgatttgaaaaccaaacagcagaaaaagcttacccatcatgaatagaaaaaaacgccgtgcggtttgcacggcgttttttatcgaaaatcttataaagaagcgcgtaggattgctagtacatcttctttgtttaattttttaaatttaccaaattcacctttagccatcgcacgatcagccataagatctaatttgtcttcaccaatatcataatctgctaagcgagttggtgcacctaggcttgaccagaattcacgaagcttatcaacaccttcaagtgctacttctttatccgtcttgccttccgtatctacgttaaatacgcgtacagctacttgcttgaagcgatctacgttctcatccattacgtgtttcatccagttcgggaataaaattgcgagtccacccgcatgaggaatgtcatatacagctgataccgcatgctcaatattatgagtagcccaatcgccttggtgtcccatttgtaacataccgtttaatgcgattgtcccattgtataaaatcgtttcacgtaactcgtagttctctaagtcgtttaataattttggtcccgtttcaataaccgtttgcagtactccttcacacatgcgatcttgaagcggcgtatttgttgcagcatggaaatactgttcaaatacgtggctcatcatgtcgaccatgccataaactgtttgattttttggtacagtaaatgtattaacgggatctaaaatagagaattgagggaatgttgccgggctgccccagccgtatttttcttgtgtttcccaatttgtaataacagaaccagcattcatttctgaacctgttgccgctaatgttagcactgttccaaatggaagagcttcagctgcgaatacgtcgcggttaatgatgtcccatacgtctccatcatattttgcgcctgctgcgattgcttttgtacaatcgattacgcttcctccacctactgcaagtaaaaattcaataccgttttctttacaaatatcgattccttttcgaacagttgtcagacgaggattcggctctactcccgctaactcatgtacctctgcattcatgtcattcagtacatccattacttgatcgtataaaccgctgcgttttacgcttcctccgccgtatactaataatatctttttaccaaagcgacttgcttctgtttttaattgctctaattgacctttaccaaaaattaattttgtagggttataaaatgtaaaattgttcactataaactcctccttacgagcttgattacatgcatcattatgaagaacaactttttgattgtaaagaaaattgacttcctaaagattattccctgttggctagatgctcaccccatccaaatgaacgtttatttgtctgtatcttccaaaagcaaatatgcatatttccctctaaaaaaagcaggctaataagtgaactacaaaacaaggagggttcatcatgagtggtattcaacgtattgcgctcgtattaacgattattggagcaattaactggggacttattggcttttttcaatttgatttagtagcagcaatcttcggcggtcaaacatctgctttctcccgcattatttatggattggttggaatcgcaggactgattaacttaggtctattatttaaaccttctgctgaagtagagcgtacagaacctagaacggaacattaaaaaagaaggatagctcagctatccttctttttttcttatttcttaattagatcttcgcggtttgattgctcaatccactcttctaatttttcttttaatgtgttgaatccttgagtagattcagtatgaactgttgcttgaccttgacgctttttagcaggttttttaggtgcagaagcttcagttttttctggagctggctcagttgcacgaatagataaaccaattttaccagttgactcatcaacagataaaactttaacgtttacttcgtctcctactgataaatgttcgttaatatctttaacgaagccatgttttacttctgagatatgaactaatccttgagtttcttcatttaatgcaacgaatgcaccgtatggttgaattcctgttactttaccttttgtaacagtaccgatttcaaattttgacatataaacactcctagataccttattattttcatcactatagccaatttaaaattatagcacagttcatagattgaatcaaaaagtagttatactatatttattatttaccaatttcgtcacaaatataaactaacactacatttcatcatagcaaaaaagatattatatcaaaccgtctatacgatatgacataatatcttatttttattataacttattttcaacaaaacggctaatccgttttatggattcttctaatgattccattgaagaggcgtatgaacagcgaatatgtccctctccgccttttccaaatacattgcctggcaccacagctactcgctcttcaagcaaaagctgctcagcgaattcttccgatgacaatcccgttttcttgacagaggggaacacataaaacgctcctccgggagaatggcattccagaccaatttggtttaatgactttaccatatagtttcgtcttctgcgatagctttttctcatctcttctacgtcatgctgcccattttgtagtgcttcaattgccccatattgtgccatggtaggcgcacacatcattgtatactgatgaattttcagcattgctttcgcaatctcagttggtgcacatatgtacccaagacgccatccagtcatagcaaaccctttagaaaagccagaaataataatagttcgttctttcattccttctaaagaagcaatagatgtaaattcttcatcatatgttaattctgcatatatttcatccgtgataacaagcaagtcatgcttgattacaatatccgcaatagcctgcagctcttctttagatagtgaacttcctgttggattattaggagagcataaaagaagagctttcgtgttgcttgtaatgacttcttcaatctgtctaggctgcagtttaaactctgtttctgccgttgtttcaattgccacaggaactcctcctgctagtgaaattaacgggctgtaagacacaaagtttggctccacgacaataatctcatcttcagggttaatcaaagccctcattgtaatgtctaaagcctgacttcctccaacggtcacgataatatcatctttataatcatacgagacgttaaaatttcttttcatatacttcataatttcaaagcggagctctaaaagccccgcatttgccgtataagaggtataccctctttccaacgataaaatactcgcttctcgaacagcccaagatgtgacaaaatcaggttcacctactccaagagaaatgacgttatccatacttgctgctaaatcaaaaaagcggcgaatacctgaaggtttcagctgttgtacagttgttgacaagcgctctttcattacggagacaccacgattctgcgatcttcatcgccttggtcgtagatggtaccatcgtgcttgtattttttcatgataaagtgagtcgtcgtagataaaacagagtctagcgtagaaagcttttcagaaacaaaaaatgctacttcagacattgatttttcttcaataataacagacaaatcatatgctcctgacattaggtacacggatttcacttcttgaaaacgatagatgcgctccgcaatctcatcaaagcctactcctcgctttggtgcaacttttacatctatcatagcggtgacgccctcatgtccatctactcgtctccagttaatatcagctgaatattgcacaattactttttctctctctagctttttaacaatattagaggtttcgtcaaacgttaaatccaccatttttgaaatactatctattgaaatacggctatttttttctagaatttctaaaatttctaactctttttcttctaagaacaccgcgttcccctcctacaccgattaaattttttcactttttccattatatcaaatttaaacacatctttattgtgaaatctataccggtaattgagtttcattttatagattgctggaaattaggacagactagaaagaaaaagatggagtgaaacaaattgactgaatctaaaattacttgccaccagcgtacttttaatggagtcaatgtttactacgaatgtcataactatcaccctgataaaccagctattgtatttattcacggctttttatcatcgagttttagctttcggcgtttaattcctttatttgaagatacgttttctatcattacgctggatcttccgccatttgggcgaagtgaaaaatcgttaacctttcaatactcgtataaaaacttagccaaaattgtcatcgagttgattgaatatttaaacttgaaagatgttgtactatcgggacactcaatgggaggacaggtttgtttaaacgtagcaaaattaaagccttcttgcgtatcaaaacttgttcttctgtgcagctcagcttatttaggcccttcacattatgggttggtcatgtcttcttatgttccattcttttatctgtgggtaaaaacgtggctgtctcgcaaaggtgtattaggcaacttgcaaaatgtcgtatttgatcatcagttaatcgacgaagaaatgattgatggctatactgaaccatttttggatgaccgtacgtttatggctttaacaagaatgattcgtgatcgagaaggagacctatcctcaaaggatttgcagcacataaaaaaaccaagtttactcatttggggagaagaagaccgagttgtccctttacatctcggacgtaagttaaaagatgatttaacagactctacctttatctctttaaaggaaattggacaccttttaccagaagagtgtcccgacattgtgcagtctcatatggtcgatttcttgtacgatgaacaagccctgtctcaataatgatggggcgagttcgtatatgtcacaagaagcgctaactttaataaaaaatttagtagtggtgcttcaacaattttccattttctttattaacttcacgagttaacttcgttgacaaacgtattaaaaataatcaaactattgtattaaaaagggggtacttttattgtctacttattcttttgatcaattaattaaccgtacaggtacgcagtccgtaaagtgggacaaaactgatcttgtttttggagcaaaagatgttctgcctttttgggtagctgatatggatttccaagcgccgcctaatgttcttcaaaccattaatgagcgtgtcaaacacggtattttcggctacacttcccctactgaatctacggcgaatgctttatcatcttgggtagaaaaaaagcatcagtggaccattgatcatgaatggattacatacagtccaggagttgtgtttgccctgagtatggctattcaagcatttacggaacccggagattcaattttaattcagcctcccgtctatactccattttttaacatgataaaggtaaatgatcgagaagttgttgaaaatccgttgaaacttgcaggcgataaatacgaaattgattttgcagatttagagaaaaaatttgcagaaggcgtaaaattaatgattctttgcagccctcataatccagtaggacgcgtgtggacaaaagaagaactgaagaaacttgctgatctttgtgaaaaatacaatgtattaattgtttcagatgaaatccattctgatctaatttaccagccttataaacatattcccatcagcatggtgagtgaagatgcagccaatcgaaccattacgtgtatagcccctagcaaaacatttaatataccgggacttcaggcttcagctgttattattccaaatgagaaactgcgcacacagtatgttcagcagcagcaaaagcaagggttttctaatttaaacacatttggaatcattggattagaagcagcttacagcgaaggtggagaatggctagaagcactgcttgtgtacctgaagaaaaatgtagatctcgtgacgcgttttataagtgaaaacttgcctgaactgcgagtggttcagccagaaggaacttatttactatggattgactgcaacaagctgcacttatctgaagaagaattacatgaacgcttattaaaaaaaggcaaaatcgccgtagaaaaaggcgaaaaatacagctccacatatggaaaaggttttatccgcttgaacattggctgttcacatgaacaacttcaagaaggattaaatcgcttaaaaatagctttaacgtaaaaaacagcgttctttctcacgaaagaacgctgtttttaatgtttttttgaaataattccacacgcgattcgctttccagaattacctgatggctctgtcattccgtcatcaccttgttcggtaataacaagggaggaaccatccatacgcttaacgagagatgtctttccttcttttaacgtgacttgaggaaccatatccgttcctttatacgtctgatcgtcttctaccacaatatttttcatatcgcctaaatgcggtccttttggatttaacagtccgtgtttctttttatcaggatcaaggtgatttcctgcacttttaaagttaggagctttgcaaattcccatttcatgaatatgtacgccgtgttccccaggtggaagtccgcttaaatcgtaagtaaactcaattccatcagcctgctctttcaacttgactgtaccgatgctatctccatctgcgttatagaatttgacttctttattggatatttctttttccatacaccccgttaacaagaaaaaaggcacggttccaatgagtagtagttttttcatgttgccctccaatcgcatatgcactagcgaaagttttagatgtctttccatagattgtccagcaacatatcattttaaacgcttacattttatttgcatttcattagagtgacttcttattttcttgttctttcagctttgcttctaattccttcgttttttcttcttcttttttagacaccttgatgatgaaccgccagactgcaactgctgctagtacaaaaatcgccattgtagcaaaagcaggaatatattctgttttatcttccggaaaataaagcaaaaacattaaattcatcatgtacaacatcctttcatagaaacggtagtgggttttgatttatactgtttataataaacactttacttaaaggagatctggcaatatgacatttacaattggtcaaaccgttacggcactttataaaaccgggaaatacatcggtgaaattacacaagttcgagatctgcattatgttgtacgaattcaagctgtgttgaagcacccagaacaaggtgacttacataatcctggacaagtggacgtacctttttttcacgagcgaaaagcacttgcttttcgagagcaggcaaacattcctcaaaaaatggttcatctctatgaagacagcgttcctgattataagcattcactaaaaaaagcccttgaattaaagatagctgaacaacaaggcaaagatagcgcttttgctcaagcaagtatttcctgtttagaagagttaaaaaaagagtacggtattcattaagcaaaaagccaaattcacatagaagtgatttggcttttataatgcaaatttatttaatacttttgaaaaatcgattcgatctcctatggtcgttggctccggcttttgaaggtacctcttatctttttctacaagcttaaagatgttgagtgtagtcatcgcatcatcaagcgcgcagtggtgctttccagttccttctttaccatactcttgcacagctttccaaaggccggtttgattttgatctccaaaaaagcgcttatactccatcgaaagatcaatttctttacctgtaaaaggaaaaggcaccttatttttttgacagcactgccttaatactttcatatccatgttcccccatgtaataatcgtgctgtttttatacatgcccagtcgctgtacaagctgctctagcgtaattccttcatttacttgattttgttcgatatggagaaatgatttacagcgctcagttaattttgtaaagtgtgtaggctgtacgtaagaggagaaacgatcaatgatttcttgatttttaacaaacaccaaaccaacttcaatgatttccggaaaaaagccttttggaaaacctttatactctggcattgtaaattcaaaatcaatgaataaatactgagagttcttatccaatattatcacccctttgtaaaataaaccgccctactatattaatgctattatagcacgattgaacaatcggaaggtctattttctgttcttatttttaatattatgaatattctagttgctgaataaaaagaatactttactactactatattctagagcatgtctctatgcgcagggtaactgtcacgaatagacataatttcgcttcttttttttacctattttttcacttttttatgtatccgctcttcccaattctctttaagctctcacatcagtgtgtgaggcggctccctcccgactccaaaagcatacctcacacctttttagactaagcctttcttatatttaagctttaggcagaatagcaagcgtgcatcgggatatacagattaaattctcttcttcatcttgaattttcacttcccaaaccgctgttttttttcctttatgtaaaggaacgcctatagctgtaacgattccgtcttttttccctttgatatgattggcattaatctctaaacccacgcagatttctttttcgatatctacacttttaatagcacctagactagccacagtttcggctaacgccaccgatgctcctccgtgcaaaagcccgaatggctgacgcgttcgctcatcaacaggcatcgtcgcttccactctctgttcacttgcgctaataatctcaattcctaatgcttctaacagcgtatcttttgttttcatatccatacctccctttgtatctagtatacaataacggttttgctacaacatatacgaaccctctacatatacataataaaaatccgttttttaggaggattcttatatgaaaccatttgctcccttgtcttactattggccatcgtactacatgcctcacccttatacatacagggtacctagcttacctgaggcggacatagcgactttccagcaatctcttaaagtgattccctctaccatgcaaagcgccaccatatttattcaaagagctaatacttcgccagctttaataaaaaaaataaaagctgctgctcaagaatctaaaatgagtgaagtaaaaagactcattctttcaacgggcgttaaggcaaaaattgatgttttttatacgccagactatattaaaattacgtttattcatcccgataaccaatttaactgctgtcacgtttcgttaaatattaaatggtaaaacacaaggaaaaaagtcttattttcttttaaaaaagatgtacatgttgttttgtttcgaatattataatatatgccatttttggatgtaaaaacaaattacacgataattgtatttaggaaataaatatgatattgtatttggaaatatattttttctttaggagggatgacatgatgagacatgttacactagtagaaattttcacgcatcctatcgctcaaaaatatttaactcgatctggcgttgcgcatgctgtatccgtcgcctatcatgcttttcgtctatctgtccagcataatgtaaaccccgatttagctacaaaagcagcgttgcttcatgatattggccactacgaatggtacacaaatggtcagtgggattatgagaagtatcgtcaaaatgatattcacgctattaaaggtgctgaacgtgcacataaattactcattcgtttaggtgaggaacctcaggcagcaaaagaaattgccttagctattttactacacacagactcatatttacctgaaggaaccattcaacaacgccctcttcaaaaagtagtcaaactagctgatgaagctgatgaagagccaggcggcaaacaccattaccgtgaaatggaatataatttggctgtaaagaaaattaaggagcttgataagaaagtgcttgaaattctacattccaaccaatttaaacagttaggctgacaggattaactcctttcataagagttaatcctttttattatttctcctcataattccctgcaaattactcatactacttattgattctcatttttggttagttaggaggaagaagaatgtctaaaaacgctagaggttacgtgcaggattcttgtacgtcattaaatcaggcaaaagcaagccttgaacaagctcttcaaacagtagagaaagattcaaatcgtgaacgtattgagcaatctcttcaggctgtagagcaagcattaggaacttgtgacagcactgcttctactctttctcaagcatgaaaaaaagcagccggttttgatcggctgcttttttcattatagacctctatttacaagataaccgaggcaatccatccaaaaataatgagtggaatgttatagtgaagaaaagttggtacacacgtatcccaaatatgatcatgctgacgatcgactgctaatccagatgtgggtccaagcgtactgtcggaagctggtgaaccagcgtctccaagcgctcctgctgtaccaacaatacaaatcgtcgctattggactcataccaagttctaagcaaagaggaacaaaaatcgtcgcgataattggaatggtagagaaagaagaaccaatgcccattgtgactaaaagcccgatgacaagcataagaaatgcccccagcatttggtttccgccaataagagcaacagaatcttttacaagcgcttctacatctccagtttcttgaagaacttttgcaaaaccagaggctgacagcataacgaatccaatgaaagccatcattctcattccgtttgttaatactggatctgcttcactccacttcaaagctccgctgaagtaaagtacaacaattcctgccagcgctccaaaaatcatagaatccactaagagctgcacagttaaagctgctacaatcgcaaccaaagctataataatgcctcttgttgtataacctgtactctcttctgcaccttgatcaatgtcaatgtcttcataccgacgtggtttgcggtatgaaataaaaacagcaaacaataagcccgctatcattcctaaagctggcagagccatcgctgcggtaatatctcctttatcaatcgttagtccactttctttgatgttagtaaataaaatatcgtgataaatcttaccgaatcctgcgggcaaatacatataaggtgtaaccagtccaaacgtaataacggttgcgactaatcggcgatcgatttttaactgattaaatacttttaatagaggtggaattaaaagcggaataaatgcaatgtgaaccggaataacgttttgagaaaaacatgaaataataaggatgatcaataagatcagtacttttgacagtgacttctttttcgtttctccttctttccctactatttttaacgctagttgaacaacggcatcaggcagccctgtccgcgaaacagccattgcaaatcctccaagcaaagcatagcttaatgcaacagaagcactgtttccaagaccatctgtatatatacttactgtatctgtgaggctgataccgccaacaagtcctccaattaacgctccgactgctaaagaaaagacaacgttgatacgcaataagctcaaaatcagcatcacgagcacagctattaatactgcattcattttgaaacctccatttttctttttactttatctcattaaaacattagagagataaacaacatattcattatattaggtatagaaaaaaagtcaatcgtcttactaaataaacgtttgtttaacttctctacacccttaacgatataaggatttttctaaataatcttttcttactaaaaagaaaaaacattatgtaaacatattaaaaaagaagcatcatcgatgcttctttttacgtttctttctatccctgctatacttttttcattaattggcttcaaatgaacaaaccattgcagctagtgttcgcaccatcacgcctgttgcacctgaaggtcctaactcatgagaagcagcggatgttgcagttccagcaatatccaagtgaacccatggtgtttgctctgcaaactcaccaataaaggttcctgccataattgcgtgcccctctcgtccaggagagttatttaaatctgctaccttacttccccgaacacgctttttgtctcgttctgtaataggcagctcccaaatcggttcgcctgtctcaatgctcgctttttctattttctgcaataaagcagaatcattcgtcattgcccccgttgtatgtgtaccaagagctacaattacaccacccgttaatgtcgccacgtctactaaataatttgctccgtggtgtttggcataggagataccatcagctaacgctaaacgcccttcagcatctgtattcagtacttctattgtctttccattcattgctgtaattacgtcatctggcttaaaagcacgtgcgctaataacgttgtcagttgatggaatgacagctactacgttttgatgaggttttaattctccaatcgcttccattgcaccaagaacagatgcagctccgcccatatctgttttcatacctacaatcccgtctttagatttaatagagtaaccacctgtgtcaaaggtaatcccttttcctactaacccaataacgtcctcccatttttcttttccttgatatttcagcacaatcattttaggaggctctgcggaaccttgattaactgctaacagtgcgcccattcccaatgtttccatctcttctttttctaaaatttcatattcaaaaccatatgtatgtgccatttctactgcataattagctaaatctgtagccgttagcatattgcttggtaagttaacaagggtgcgcgctgagtttgttgcttttccatacgtatatccaaccaaagcagattgtacaacgtctttataaaaagaaaacagttgaattttctccagctgcttatcaggttcgtttgatttctttttgtagttttcaaactcgtacatagcaagctgttgagcttctcctaataaagctgcagtttcttgctctggccacgctcctgtatcaaatgtaggaagggcgaccgatgcgtttgaaatcttcgcttcttttaactttttaaataacagcccaaagctctctttgagcccatttttagttaacgcttgctttcgtccgagccctacaaaataaagacgttttgctcctaattttcctagtgtatgaatcgttgatatacgtttttcttgtacacgtatatccccttctttaatcaaatgaatcagctgtccacctaaagcttcatcaatttcttttagaaggccttcaaactgttggttttgattaaataacccaattacgagcgcttctgtttgatgatcaacaccaaatgtttctacatgcgaaaacataaaattcctcccttttacgtatagagattttatttttatttatcatctgctttgtttaatctattctgcaagtggaatatatatcatattcaccactgttttcatctatatacatatgatagcagaaatacaatttttaatcacagttcaaaaaccttagtttcacacatatactttcatctaccgcttttttcatcatatgggtttagcttttcagacattttaagttgagggaggacgtctcaatggagttattctcaaattttccactttggagttcattaatcgctattttctttgctcaatttattaagattcccctttcttttgtagctactaagaaaatagacggcagcttattttttagtacgggaggtatgccaagctctcactccgcagcagtaacttccttagccactgccattgggctagcagaaggtcttaaatcccctatttttgctctctccgctatttttgccattattgtcatgttcgatgctaaaggagtaagaagacacgcaggagagcaagcaacggttttaaatcgtttagttgaagactttcagcgcgcggtaaaagaggcaaagctgtggacgaccaatgaagaagacgaaaaacaagtgaagctaaaagagctgcttggacataagcctatcgaagttttctttggagccttaacagggatagcagttgcttttgtaacgtattatatatggccataaaacataagaaaacacatgaagagttcttcatgtgtttctcgtttattttacctgctggcgaaaaacctgcatcgacttcttttcattcagcatcgttaactcttcttcagttaagcggccgtcccctgatttcactacatagacgtttaattcttttttaccccatatgttgtacacatcggaaacagtctcaaaatataaatcaagatgattgcctttaatagccccacctttatctgctaccactccatagccatagcccggaataaacaagatcgtgccgattggaaatatggttaaatcagcagcgatggttgaatacaagtcacgttttactttaacgcccgaatatgtaataccgtaccctggatgattgggatttttcccagttgattcgtaaccagctgtgtaacccgtagctaatacattcttcgttggataacgcgaccaatcaaatgcttcttcaatcgtcagacgctctttgtcattgctagccgcttcagctcttagtggttttagaaatgatggcaagagcctttcattcattagaggatgccctgtactgtttataaaaggcatatatttgatgactgtggttattgggacgccagtaattgcttcatatgttgtaaacagcgctccgaccagtagtaggcacataatgaatcgctttgctatttttccaatcattgtgatttccacaactcctctcacgaatctatttgtttccaacataaaaacaaattattcgtttgcgagaagaatttacatttaaaacatttggtaccctcttgttcgtaaagatttaatggtaatgcctgaagctagtacacctataaaaccagccattaaaatcgcaatgtcagctgtggctaaagatagcacttttgtccctagctgctgaaaggagtgagcgggatgttgaatgtaatcaaccgctcttacatcatcaataataaaaataaaaatcacgggataaataatggccataatccaagacatgcgaagcagcatattcaataagaaaccgattccaaaaaacaaaacaaaaaacaacaagatggagataattagtacaggcacactcatttccattgcttttcgcctccgttattctttatactctcagtttacttaagagtaatgaaggcgtcaatcacagaaaagtaagttaataccaaaaaagcaaaaggcttaaagaccttttgctttttgttttaaaagaaattaaattttccttttttcaatacaagacctgctccgccttgaaggaaaagcgagcgattatcaacaacttttttcataaaagatgcgcttgaaccaaatagtttccgaccgtatacaacgccaattgcgtcatcatgccctaacgaacataccgttcctttaatatctggtttgaactcgcttaattctttttgacctttcatcaaacggctaatattttcagcgcaggtaccgccttgctgcatagcaatttgagctgttggcggataaggacgttctgtttcagggttaatcattagtgaacaatctccaataacaaacacatcttcatgccctggtgccagcaagctattgcttacttttacacgtccgcgcatgttctcaaatccagctttttcaatcacatgactgcctcgaacacccgcagcccatacaactgttgctgatttgatttcttctacttggtcatcttttgatacaacaattccttcttctgtacactctttaatcgctgttccgatcttgaactcgattccttttcgttctagttgtgttaccgcatattctacaagttctggatcaaaacctggcaaagccgtaggcgctgcttctacacaaataacgcgtactttttcacgcggaatatcaaactctttgcaaagttgagggactcgatttgctaattctcccacaaattcaatgccggtaaagccagcacccccaacaataatggtcagaagttcgtctcttttttccacttcattgttgtacgtcgcaaacacataatcaatatgctcacgaatttgacgtgctgcattaatgctcgtaatggtaaatgcatgttcttttaaacctttaattccgaaagtttctgcttcataccctaaagcaacaactaaataatcgtacgttagctcactgttttcaagaagaacacgcttttcatctaacttaatatctacgaccgtgtctttgataaatctaaccttatttgtgttaattaaatttttaacaggaacacgagagcgatcttgatgaattgtacctgctgatacttcatgaagccatgtcgtttcgtaatggtaatcgtttttatttaccaaaacaatttccgcatcactagcacctagcttcttttgtaaattaacaatggtcataatgccgccatacccggcacccaaaatgacgattttaggctttttcataggaatgtcatccaccttttttagttatagtcacaagtatgtcttacaaatataatgataagagcaattttatttagtttgcttttttatgttagtttgagcaagaacgatcatcgctatccatttattattcacataaaaaaacaatgtgaatcacttcacgttctttttttaaaaaatacattttttcttttttaaaaaaatgtaagcgtaagtcctagcttgatttacacaaacatcttatgcttttttaatcggtttttcaacccttcactttgtatttacaagctttttaattttcaattactttcctgtatacccagttttatatttgaccaaaacgcgtgtttatgttaatgattacaaatactgctctttaagttgagaaagtttctcaaacattccagcgtgttttaatgatattttataatttactatgctatcataaagtagaatatgcattggcacagaacaatctagaggtgattataaatgaaagaagataaacaagtatatgatattaccatcatcggaggcgggcctacaggcttatttacagcattttatggcggtatgcgtcaagcgagcgtaaaaattattgaaagcttaccacagcttggtggacagctttctgctttatatcctgaaaaatatatctatgacgtagctggttttccaaaagtacgcgctcaagaattagtcaataacctaaaagagcaaatggatcaatttaaacctgcagttgcactagagcaagccgtagaaaaggtagaaaaacaagcggacggcgtatttcgattaactactaattctgaagttcactattcaaaaacaattattattacggctggaaacggtgcatttaagccccgtaaaatcgagctagaaaacgcagaacagttcgagcaaacgaaccttcattattttgtggatgatatgaataaattcaaaggccgcaaagtattagtatgcgggggcggggattctgctgtagactggtctcttatgttagagccgatcgcagaaaaagtaacgttaacgcatcgccgagacaagttccgcgctcatgaacacagcgtagaaaacttgcataattcatcagttgatattaaaacaccgtatgtaccggttgaatttgttggagatgaccgtattacacaagttgtgttagaaaacacaaaaggtgaagaaaagacagtagtagacgtagatgatgttattgtaaactttggatttgtttcttctctaggtccaattaaagaatgggacttagatttagaaaaaaatgcaattgttgttaactcaaagcaagaaacaaacattcctggcatctatgcagcaggtgatgtctgcacatatgatggaaaagtaaaactcatcgtggcaggatttggcgaaggtcccactgccgttaataacgctaaagcatacattgatccaaaggctcgcttacagcctatgcacagtacgtcaatgttctcataaaaaaagcaggctctcgcctgctttttttcattgctggattggtgtaaccattcgatgaatgatttcactcatcatttccgcatcactgcttattaaacagatttcataaaaggaatggtttccttcttgactagttacgctcatcctgtaggtcttcaaaccttcgagcttgcttaaatattttactacctctgattgaccggcaatacgttcaatcagcagaatatgctctccttcaactgctccgtagctttcagccagagatgcgttaacattttcataatagcgaatgtaaggttcagaatggttaagaggcgcagaggacgagttttgatgacaggcttcacctgaggaaaaaggcaaatgctgaacaaataaatgcgattcactaaaatgaatactttttacatccttagactccattttgctactttcaagttttaaccagtttataaaccccttccatagaataggcagggtattttttttgcgaaaacttccgtaacctcctacttgttccgcgtcgtaacgaggcgcatctatcaaatccgttcatctcctcttttttattgagtataaaaaagactgattattcagtcaacatatttgacagatgatgtaacatacaaaaatttctcactaaaaaagctttcttcaccagatgatgtgaagaaagcttcttgataaaaatatatttagcactcttcaggagcacctgcgttgcttgctgtacggaaagaagagccgcagccgcatgctgcaatggcgtttgggttatcaattgtaaaccctccgcctagcatagattgcttgtaatcaatttttacatcttttaaaattggagcactttcgctatctacaagaatcttaatgccatgttgttcaaacagcgtatcgttttcatttacttcgtgagcaaaccccatgccgtaagaaagacctgaacagcctcctccatttacattaacacgtaaataagcattttcctcttcatgttctttcatcatatcttttatttgaaagcttgcagcttctgtaattgttaggatatcctgactcatttttaaacagacctccttttttgtttagtatacgacgaaatgtctgcgacgacaaatcgtctgcttcttcattttttaataataatacgcgccgtcacaaatcacattggctggacctgtcattaatacattgcctttattttgccaaacaatcgttaaatctcctccagcgaggtgtacgacagtaggaacatcttttttcgtcttctcatttaatacagacgaaacaacagcagcacatgctccggttccacatgcttgagtgatacccgaacctctttcccatacacgaaaattcagctctctttcgttcactacctcgacaaattcaacgttcactccttctggaaaacgcgaatctttttcaaccacaggccctaatgtagtaagaggcgcttgttcaatattatttacgtaaaagacaacgtgaggatttcccattgatacagccgtcccttttaaccgttcttttccaaattccatctcttcattaacgacttggtcttggcttgctcccgtcattggaatttgttctctagctaaaataggtgctcccatatcgattgtcacttctggaacttcatttccctgcggatgcaccgttgcttctacaactccagaaagcgtttcgataaaaaatctttcgcttgttactaaattatgttcatatgcatatttagctacacatcttaaaccgtttccgcagttttttgcttccgagccgtcattattaaatacgcgcattttcacatctgcacgttcagatggacaaataagaatcattccatccgatccaattcccgtatgaacatttgagacttttacagcaagcggtgctaactcttgctcttctatatgttcttcaaacatatttacgtagatatagttgttgccaagtgcatgcatttttgtaaactgaaattttttcatattatcacccattatttttttatgtagctctagtataaagtgattctcttttgtacacaataatatcatcccccgtttttttagctccttaatcataaagattaaggggttttttattttgtcctcctttggagtattaaaaaactaaagaagcattatgattgcaaagaggatggttaaaacgcagatatttgcgcaaaatcgcataaaaaagcacggcaagactagccgtgcttacatcatctattctattagcctcatgtccctctcctgataaaaagagatacgacagcggggatagtttaaaacattggattttcttctaaatgaatgtaaatattatccactaactgttcaggtgtttccgctgtaacaatctctccgtttaccaaggcaaataaagattgtgaacatttcccgcaataacctaaacatccgtattcaatgatatctagatttggatctttttcaagctttgctaaagctccttgagaaccactggctaaattactaacgcaaaattcaataattggctgtatcacgtttttcacctctctactattagtttatcctatctcctttcattttcaacgtcaactttggaaattcacgttcatgttgcgtacgctttttagtttcacagactttttcaaaaaaacgtataaataaagctttattacagggatagctttaaattatgttgaaacatattgtggttttttattaatttagttatacttttatgtatagaaaaccaaacgaggttatattaaattattatttaagtaaaatatgttatcttatatggcctttcatatctttttggcaaccatccttattaacggtaatttgtactctcctattctcaaaagcaagaataatagagagaaaacaaaaatgcatgaagctaaaggggaaattcacatgaagaaccttgtcatactgggcggcggatacggtggtatgcgcgttttgcagcgcctttttccgaatcaattgcctaacgatgtagaagtaacgcttattgacaaagcaccttatcactcactaaaaactgaattctatgcacttgcagctggaacaatttctgatcagcatgttcgtgttgcttttcctgaacaccctcgcttaaagattcgctacggctgtgtaaaacgcatagacctaaaagagaaatgtgtctatgtggatgatcaaatgatcgcttatgatgacctgattgtaggacttggatgcgaagataaatatcatggagttcccggagctcttgagcatacatacagcattcaatccattgatgcttcacgagcaacttatcagacattaaacaacttgccagcccacgctactgtttcaattgtaggagctgggttaagcggagtagaactagcaagcgagctaagagaaagccgccccgatttaaaaatcatcttatttgaccgcggtaaattaattttgtctgctttcccagaacgtttaagtaactacgttcaaacttggtttacttcaaacggtgttgaaatcgtaaatagtgctaatattacaaaagtagaaccgaacattctttataatcatgatgagcccattcaaagcgatgcaatcgtgtggacagcaggtatccagccaaataaagtggtacgcgatttagacgtagaaaaagaccctcaaggacgcgtcgtcttaacgaaataccataacttgcctgacgacgaaaatgtctacattttaggtgattgtgcaagcctaccgcatgcaccaagcgctcagctggcagaaggtcaggctgaacaaatcgtgcaagtacttcttcaccgctggaaaggcgaagcgcttccggatgaattgccaactattaaattaaaaggcatacttggttcattaggcaaaaagcatggatttggcttagttgccgaacgtccaattacaggacgcgtagctcgattattaaaatcaggtattctttggatgtataaacaccatagtggataaaataaaagccgttagatgactgacaatctaacggcttttttcattataatgcgcagaaaccatacttctccatttcctcaaatacgcgctttaatttcgggttgccttccccaacaatttctccgttaatgaccactacaggatagaataaatcttcttcaatcacacgcttggcaaaagctgctttttccggatccgtatgcggctcgtttatatctacatacgtgatagcaaacggctgattcggatatttacgagaaatagctgcctctagccaatcataggtgtcttttgaagacggcaggttaacgcagcttgcacaaacaatttcagctccataaatacacacttctacctcagttgattgcatagcacatcccccttgaatctttacattcaaactgtacgattattcagacttttacttcattatgaatactattttacacaaaactgattcattgcacatctttttcttttaaggtaacattacgatgtatactccgatagatttttcatgaaagaccgtttataataagagtagaagaaaggagtcgatagttatgtcagaaatgcacgagcaagttcaagaagtattggaaaaacttcgtccgtttttacttcgcgacggtggagactgtgagctagtagacgtagaggatggtattgtaaagttacgtcttttaggcgcttgcggaagctgcccaagttcaacaataacgctaaaagctggtatcgaacgtgcccttttagaagaagtacctggtgtagtcgaagtagaacaagtattctaatctctttgattttattataaaagcaacctcccattttattggggcttgcgaatgaaaaatcctcattcaaatgaatgaggatttttttattaactcgttgtgacttcagcttctacaaatacacctttgcgatcaatttgtaaaacatctatttcgcagttcggcagtaaagcatacatatgttcagcaatcgcttttccttttccttttggtgctaaacataatacactcggaccggctccgcttaatgacacaccgtatgcgccgagagcttttgcttcttttcgcacaagagaaagctctggcacgagtctcatacgataaggttcgtgatataaatctttctccataaattcgcctaccagaggtaaatctttatttaaaagggctgctactagcatgttcccgattgccccagcttctactgcgtggcgataattaatatcggaaggcagcacatcacgagcatcggttgtttttaattcatattctggaatagccatcacgatatcgacatcaaattcaggtatttgagcaatatatgtttcattttcatgatggtaaccaacaacgatgccgccgtaaatagaggggctgacgttatcaggatgcccttccattaagctgctgatgcgaagcttttctctttttgataaacgcaagtcacacagtacattggccagctcgattccagctacgatagccgatgcgctgcttccaagtccccttgctaatggaatgttgctccaaacagagaccttcgcacttggaagatcaatgttaaattgacgagccacgtcttgtgccacttcatacattaagttatctgtacctgtaggaatactttgcacttctttcgtttcagggataaaaatccattcctcatgacactctactgttaatcttaagtagcgagataaagccactccaatggaatcaaatcctggccctaaattagcagagctagctgggaccgtaatgacaaaacgctcattttctagcatgaagcaacgacaccttggatatactcaaataccttttcttcatcatttggtaaaaccactggctttacattatgagcatcgattgctacgtttggatcttttaatccgttacctgttagtacagctacaaccgttgaaccttttgcaattttaccagaagctacatctttaaacacaccagctattgaagcgcaagaacctggctctgcaaatacaccttctttgcgtgcaattgtacgatatgcttctaagatttgttcatctgttacttcatcaatttttccgtttgattcttttgctgcgtttacagcataatcccagcttgctggatttccgattcgaatagccgttgcaattgtttctggattttcgataacttgattacgcacgatcgccgccgcaccttctgcttcaaacccgtgcatgtgaggaagagacgtttggtgacgctcactgtattctttgaagcctttccagtaagctgtaatattccctgcattccccactgggatagctaaaacgtcaggcgcttttccaagctgttcacaaatctcgaaagaagctgttttttgcccttcaatacggtatgggtttacagagtttacaagtgcaaccggtgatgtttcactcagcttacgaaccatagaaagtgcttggtcaaagtttccttcaattgctacaatttctgcaccatacataacagcttgagctaatttccccatcgcaatttttccatttggaataacaacgatacagcgcatgccagcgcgtgatgcataagctgctgcagctgcggatgtgttacctgtagatgcacaaataaccgtattgcttccttcttcttttgcttttgctacagccattaccattccgcggtctttaaatgaccccgttggatttaacccttctactttcacatgtagatcaatgcctagctcttttgataactgagcaagatgaattaaaggcgtatttccttcatgtaatgtaagcataggtgttttctctgttacaggtaaaaattctttatattcagctaatagacctttccacatcatactgtgccaactccctctacgcggtaactgctttttacattttctacaattggtaaatcccgaagctgctgaaggatttcctcataatctttttgagatgttttgtgtgtaactacaacaatctcagctaattcgcttcctttcacaggaagttggataattttttcgaagctcacgccacgctctgaaaatagcgttgttaattttgcaaatgctccaacctgatctttaacatgaatacgtaagaaatgcttcgagaacatttcatcttctgcttttaactgtttcggatactgaggtgttaccgcacttttaccattcacacctaaacgcatgtttttcataacacctactaaatcggatacgacagcagtggccgttggcaggcttcccgcccccggtccatagaacatagtttctccaacagcttctccgtatacatatacagcgttatactcatcgcttactgaagcaagaggatgtgtatctgctaaaagagttggttgaacactaacttctacattgtcaccgtcacgatgtgcatatccaatcagtttcatcgtatagcctagttgtttactatattgcaagtcttcttccgttacttctgtaataccttgaacacgaacatcatccaagtcaattttcattgaaaatcctaatgtagccaagattgccattttacgagcagcatctaaaccacctacgtcagaagttggatccgcttcagcatatcctaaatcctgagcttcttttaacacttcatcataggcgcttccttcttttgtcattttcgttaaaatgaagtttgttgtcccatttacaattcccatcatcttcgtaatacgatcagatgctaacccatctgctaatccacgaaggattggaataccgccagctacacttgcttcataaaataaatcacaattattttcagaagctactgttaacaattctgagccgtaaaccgccattaaatctttgtttgccgttacaacatgctttttattacgaagagctgttaagatataatctcttgtttcttcaacgccacccattacttcaatgacaacgtcaatctccgcgttatgtaaaacgtcttcaacattcgttgttaatttatcttcactgatctccacgtcacgtttcttatcaatatctttaactactacttttttaacttctacaggacacccgacttgatgacttaatttatcctgatgattttcaataattttgactactccgcttcctaccgttcctaatcctaataatcctactgaaatactttttgtcatattcctcacctctgtgttctttctacgtatacatttgttctcttatagaggacattatagaccttatttttcttttttacaaggtttacttgccatcttttctcgtaaacttgttaaaaaaattggtatataaagataaatgtaaatttttaaaatatttcattttattatcataacatggctactcctgttttttaataaaaaaaggacaatttcaccgaaatgaaattgccttttttattatgattttttcgcaaacgcttctttatttacaattgtaataggagactcgtttgtgagcactgctttaatgttttttacgcataaagaaatcatttccgtgcgcgtttcgatactcgcactgccgatatgaggaagagctacaacattaggcaattgaagaagagggtgagaagcagaaacaggctcttgatcgaatacatccaagccagctccagcaatttcaccggattgaaccgcatgtaacaatgcttgttcatcaaccactgctcctcttgaagcattaataaaaattgcagttgttttcatctgttcaaatgcttcagcattaaataaatgtttggtttcgtccgttaatggtgtcaaacaaacaataaaatcagatcgttcaagcagctcatttaactcacagtaaactgcatcgagcttttgttctgcttgaaggttgcggcttcggttgtggtacagaatttccatatcaaaacctgtagcacgtttcgcaagcgtctctccaattttccccattccaacaatacctaatgttttatgatgaatatctctacccgctaacaaaaatggactccagcttttccactgattttctttcacatatccagcagcttctactaaacgtctagctacactcattaataaaccaaacgttaaatccgctgttgtatcagataaaacatcgggggtattagaaacgataattcctcgttcagttgccgcttctacatcaatattatcgaatccgaccgccaagttagctacaagctttaaatgaggagcttgcgtaagcaattcaccgtcaataagatctgaaagcattgttaatagagcatgtgcgtgcttagctttttcacaaagcagctcatgagggactgcctcatcttctttatcccacatttctacattcgctactgcctttaaaggttcgattaattcattcggtatttttctcgtaataaatacaaacggcttgtccatatgtacgccacctctttatcctttttaaactgcatgcataaaaacaaaatagaaaaacaggtttggattatccaacacctatttttctattttatcatattctatagtaatcgctttttaatgaatccatgttaattcaggaatgtgataacgagacgttgaaatacccaccgactggtaaaagcgcttcagaaaagcttcgtagtgagaagaatgagctaatactccttccagcttctcataatacttttgtttttgcctctcatcttgtacactgtaatacccttcaatgacctcaaaataatgaacgggaaaaagaagtctagcatataacagtctccatgaaaaagaagaaagcggatttaccttttcgtattcacttaaaaactgatgcatgtgcctttcatcgacagcgtatgttaataaatattgttcccttatatattcagcaatatctctgctagggtgatcgaaaacccagtctgccgggagcttgtaaacgtggtcttccccccatgttttttgcccgaaccgatgatgacaaatcgtcgcagcgtcaactgaacgaggcaaatcgtcaatttccgtgtctactaggtattgaatagcattttccgttaatcctaggtaataaggaaaagtttctaaaaaacgtttttccatctcttgattaggcaaagcacgtaatcttccataccaaaattgctccatctggtcgagacgcttctcccacatggacttccattgccctagccggtttgctttttccacttcataaggaaacagtctccctttttgatgaaaaacagctagctcgtgcccaggtgaaaagttggggtttttctcttccgcaagacagcggcaaatgataaatttttcagtttcagtttctgtaatcatttcaccattcaaattaggcataaatgttgccacatggcgatcaccttggcccatcaaaaattgactcatttgatatagttcatttaactcgtcttgttccatttgttttacattaatgattgtatataaaatatctcgatactgaaaaccttcaaatttacctacgggcataaattcatttggacgtaatccgtaatgctcataaatggtttgtatcattttaatccctctcttcattcattcaagaaattatatgatggaaaacaacattacttgtcataatatttacggaggaatgaatagattagaaatacaccatttatagttatttactccgggttagtagtatgaaacaactttagacttaaaaatatatagaaaacaggtgatgatacttggagaaaaaacatacacaaagtgagttagaaaaaaaagcaagagaatggttaatagaacgcggcgtggctcttacagacattgctgaactggtctattacttgcaaaaaaagtatcacccaaacttaacaatcgaagactgtttatataatgttgagcgcgtcatttctaaacgagaagttcaaaatgctattttaaccggtattcaactagatgtcctcacggaaaaaaaagtgattgagccgcctctgttggatattcttgagaaagacgaaggtttatacggtatcgacgagattttagcattatcgattgtaaatgtgtacggatcaatcggctttaccaattacgggtatattgataaacaaaagccgggtattttagaaagattaaacgataaatctactggagagtgccatactttcttagatgatttagtaggcgcaattgctgccgctgcttctagccggttagcgcatcgggctgccagtcaagaataggttttaaaaacaaaaaaagctgtcaattgacagctttttaaattcgctccatccactcttttagtgaatctactgtataagttggctttttctcatatccttctagtaactctcttgttgttacccctgtatggactaataatgtatctaagcctgcattcatccctgctaaaatatctgtatcatagtaatcaccaatcatgattgtttcttcttttggcgtaccgatgacttcaagggcttgctccataataatactttctggtttaccaataaatactggatttgtttgagtagaaaccgtaataacggacgtaatagatccattaccaggcagtaagcctctttcagtaggaatcgcaatatctccgttcgttgaaacaaaaaaggcgccgtttcgaacgtttaaacatgcttttgccaatttttcatatgtaatttcctgatccaaaccaacaactacaaaatccgtatcttcctcttcaatggtaaatcctttttcaagcaatgcatgtcggattccttctccaccaattacataagctgaagcgtttgctttgcgttcatgcaaataattagctgttgcctgactcgttgtaaaaacttgctcttctgttgcaggaatgccaaatgcctctagcttttcagctactttatcgggcgtttttgttgagttgtttgttacaaataaataaggaattcctttttcctttaatttaataacaaaatcacgtgcctcggcaattagctctgttcctttgtacattgttccatctaaatcaatcaaatatcctttatattccttcatgttatgtgtgatctcctttcaagtctcatacttgaaatcatagcttattttttatacaactacaacttgcttgcctttagttacgaaaagcagacacaggccctaactctgtctctagatatgtccttacgcgctctgaaaatgctgccagtacgtctttatgctgcatcactttttgataaatatcctgatgattaacatccacatattcttgaacaaggcttttacgcaattgaacgatctcttttaatggcgtttcttcctcttttttaaccactttctcatcaactaaaatgtcaataatatcgtcgtaactgccgggatctctcataataaatccatcaatcattgcatttcctacatctaaaacgttttcaattaaaagatgtacaattctctctaatgcctttttctctatttctgtgttccagctcgaatgctcagcaaacaaacgaacgtgctcatcaaaaaaaacaagcgtggcttctattttttcacgatctacaaagtacatattatttcctccctagttgtcagctctctataaatcttttttcataaacaaacggggttcctgttctattttatcatgacccattatccatttgataaattcatttttgtttttgaccttatttgatatgatacaaatacaacctatgaaaggagtatacctatgagcgaacgcttttatctatatgacgatgtcgtatctacaaagacccgttttgtcagctttatgggcgaaaatcaacgatttgatttagctattatccaaaccgaccgttattatggcaaacaagttgttcttgatattcaaggaggacgctttgccatcattggacaagatgaccttgaagaaccaaactatcttgaagaagtatttaaattaaacagtgaagacggtcaggaacttcgcgaatttttatatgaaatcatctaaaaaaaaaggcagcgtgaaggacaattagtgtcttcggcttgcctttttttacttatggactttttttaagacaaaatacgcacagccaaaattacaatattcatgtaaatagtcttgaagcgtactaatcttcgtatcatacgttgccttttgattccggtcatcaaaaaagccttgcagtcgaagctgattgtatccccaatctcccacaatatagtcatagcggctcaacacgtcaataaagcgacctctaaacgcctcttcattaaatgcttcgcgctcatcttttaatacttcataacaaatattattgatacagaccattgctcacacctcttctcttaaaatttaccataccataattatgatgatgaaaccatcaattaacatgaaatttttcacgtataagcagcactctaatcctgtaggagttttatcggtatacctactgatcttttatgctccccatgagggttcgccggtttacctggcgtacgatatttaactacaggaggtggaaatggtgaagaaatctattcttggaatcgctttgataacaagtattttaaccattggctgtcaaaataaaaatacagctgaaaatgaaaatttatcaccaaacaacccagatgccattaatgtaaacgagcctaatcattattataatccaaataataatagcggcacaaattatggatatgtccgatacactaaaaacacaaatgaacaaaattccaatatgaaccaagtaggaacatttaatcgagaagaagcagccgacaatattagtaaactgagcaccgctatcccaaatattaaacaagccgctacgctagtaacggataaagatgtgcttgttgcttataaaacagatgctaaaaataggaataacgcagccgatcaggtaaaacgtacagctatgtctgtagtccctcgttattatcatgtatacgtctcagataatccgaaacatatggaccaaatcgaaaatatcagtgaattgaatacacaaacaaatgatgctagaaaacgaatcgatgccgttattcaacaaatgctaaaatctccccaagggcgtaaaatgaacggcggagaagatgcaaatggaagagagaaaaacgaattgaatgaaccgatgacggacaaagatatggtagaataaacaaaaaagttgagacgtaactaaaagaatgtaatcgaaagacgaagaaatgagacacatgagctgaaccgcttgtgacaccgcagttgatttccgtgcaaggcttctttccgcgggcggccgctgttcccgcaggagtcttcgccttgccctccaatcaactgctagaaggaacaaaacagataaattttacgttaaccgtaacaaaaaaaaacgaaccactaatcaaacagtttgattagtggttcgtttttcacttcggctaaactacttttgttccagcctctttttaccttatttgctttcttgtgctttgttttttgcagcagcgttaacttgctcatctgcatggtaagaagaacgtacaagaggacctgcttcgacatggctgaatccttttgataatgcaatttcttttagctcttcaaactcatttggatggtaatatttttgaacttttatgtgctttttagttggctgtagatattggcctagcgtcataatatctacattgttcgcacgcaaatcatccatcgtttcaataatttcttcttttgtttctcctagaccaagcatgatacttgattttgtagggatatccggctgcatttcttttgcacggcgaaggaactcaagagaacgctcatatttagcacgagcacgaacacgaggcgtaaggctgcgtactgtttcaatattatggtttaaaatatcaggacgtgcgtccattacaatacgtaagttctcttccacaccgcccatatcagaaggcaatacttcaattgttgtgaatggatttttacgacgaatcgcacgaattgtttcagctaatacgcttgctcctccgtcttttaaatcatcgcgagctactactgtaataaccgcatgttttaagttcattagctgaacagaatccgctacgcgttctggctcttctaaatctaattctgttggtaaacctgtcttaaccgcgcaaaaacgacaggcacgtgtacatacttctcccaaaatcataaaagttgccgtacgacgaacagcccaacactcatgaatattcggacatcttgcttcttcacaaactgtatgaaggtttttttcacgcatcattttctttaagcctgtgtaattttcgtttgtgtttagcttaatcttcagccactcgggtttgcggacatgctcttcttttgttgccatattatcaactccaccaatctagaaaatgtctataacctatatgcttaattttaactacatattaaaaacataactatatgtcactttatcataaaaaagtgagattcgacaagttgtctgctctttattttcctgagttttcttctattttccatccgaatgtgtgcgttttcatcctccgtataatttccatttatcttctgaataaacttctttaaaaaagttttggagcgatttccattaattaatatttatgaaatcttttttctcgctgcaaactagtgttacacactatttttagaaagggggaaacacgatgcgcaaaacgattatcttactttttatgttcatgtctatattcacaggatggcaccacgtaacagctgaatcttcagcagatcaagaaaaaatacttattcaaaagagattagagctgtataaacaaatggaagccgctactacgattccttggtattattttgctgggattgaccagtatgaacgaaatattcgacgctctcataaagatattccaagagaaaaaggcgcgatcgccatttattatcctccagaaaaatggtcaggttctctaaatccaaatttggaagatacaaacccacttactatttctctgctcgggggaatgggcaaagatgggaatggagataaaaaagcagaccaatttaatgatgaagatatgctttttacaatggcagattatattcggacgttcggggtgtccgaagactatattaaaattgccctttggaactattatcaccgggctaaagcagttgatattattttagggaatgccaaaatttttcgccattatggacgcattgatttaaaaggttcttcatttccggtgcctctgcgtgcgaactacagttatcgcagtacatggggagatgcgcgcggctggggtggcaaacgaattcatgaaggaacagacatttttgcagattacggagttccagtaaaatccccttgctatggcattattgagcttaaaggatggaataaatatggaggctggcgaatcggtattcgtgaccttcataataactatcactatttagctcatttaagcggatttgcaaaaaatttaaaagtaggacaaattgtagaaccaggaacactcattggcggagtaggaagttccggttatggacctcctggaacttctgggaaattccctcctcacttacattatggaatgtataaagataatggtaaaaatgagtggtcgtttgacccatatcctcagttaagaacgtgggaacgaaatgatcgtttagaactaaagaaaaaataaaaaaacaggaagctgatgcttcctgttttttatcctgatgttttgctttcctttgcttttttcacagcatgagcaatactcgcggccaatccgccccatatgatgaccatccctacaaccatcattgttattgaacttccatccattatttggaaacccccttctctttaactgacaaacgaatcgtcccatctttccatcgtgcaaaagaaaaagcaattcctaaaataactgccagagctgccacgccccaaccaaaaggacctacaaaagttgttgcatactgctcgtaattttccgaaatattttttcggaagttatcaaacatcatatacccaagtacaagtggtgtaaccactcctaaacatattttccaccatgaaccgattcggatatcagaaacttcgtttgcatgctgctgaaggctgctcaactttttaaatacccaagcaactaatacaacttctactaagcctgctaaagcaactccaaagttattaatgaaatagtcgaccacatctaagaaataaagtccgccttgtgttgcaaataacagcgaacaaattgaagcgattcctccgcctattaatacagattttgtacgtgagatagtaaatttatcttgaatgcccgctacaaaggtttcaatgattgaaataagtgacgttaatcctgctaatgttaaggaagcaaagaataacattccaaacagctgtttaaaggccggaaattcattaataatttgcggaaaaacaacaaaggctagtcctactcctccctgaaccaccttatcgattgggataccttgctgagtagccataaaacctagtgcgctaaacacaccgattcccgctagtaattcaaaagcggaattaccgaatccagtaataaacgcattattagttaaatcagattttttaggaaggtaactggaataagtgatcataatagcaaaaccaacagataaactaaagaaaatttgaccatatgctgcaatccaaacctttccatctccaattgcgctccagtttggtttaaagaaagcgtgcagaccttccattgctccgtccaatgttactgctcgaatgacaatgattaaaaatagaacaattagtgttggtaaaaagattttgtttgccgcttcaattccttttttgattccctttaataacacacccaacgtgacaatccatacaagtacaagcggaattaaaacatgtaatacaatgcttcctgtttgtcctggtgcttcagctaattttaagtaatctccatataaaaacgcttccgtatcctttccccagcttaacttaaatgaaaagataaaatacgacatcgcccacgcgataataacggaatagtaaattgaaataaaaaaggaaatagctacttgccaccagcctagccactcagcctttggacttagtctcgctaaggataaaggagaagaacctttatatttatgacctatagcaaactccatgattaaaataggaattcccgccgtcaacaaagcaaataaatagggaagaaaaaatgctcctcctccgttttcatacgcagtagctggaaacctccatatattccctagtccaattgctgaacctgctgctgctaaaataaaccctgctcttgatccccactgcggcctattttccactgtaattcccccttctgttctctccctactctctttttatcgtagatcagcgagaatttttataatttttagattattctttctataacttcctatctcaaattatagaagggagaagatagtatgtcaaaatattttttatagaaaattcagacaaattatccaaggaataaaagcaagtatgaaagtctttttgaacttccgcacctgcttttttagtaatactttatcacgttaatataatattgttaatttttcttcggaagttcaatcgccggagaagacgagtttccaccgttaaaatagtcaggaacgtttccaggaataacggtgcctccgaccgggattgtagccgtaacggttgtttttttagttgcaaatgggataataatttgcatgtttacttttactttgatagatacttcaagaaacgcattatttattccatactcctcgatttttcgcactacgtctgtttgaacgtcaccaatagcatgaaatttaaccggaatcagcggacctagatttccaagcagcgcattattagtcgcttgcccaagcggaacttggtatacaattccttgattccgcaacttttcacttttttcaatacgaatatctgttggaagttcaagtgcatctaaattccctttctctgcttcttttaagttagcctggacaaatgacgtagtttgagctctaacccgatttacaagcgctgtgtcaattttagctacttgaccgttaggtgtagattccactttaataacatctacgtccaattgatcaagtacctgtttattcaccgctttattaataactaaagttgcaatctcttttgtttgtgcttcagcatatttcattaacgtcggttcaatccctctattaattagccataatcctacccctgtagaaagcataaaaaaaagaaaggtgagcaacagaacgtaacgaaaaggaagcgggccttttcttgttaatttccgacgaagtttaaccaaaaaaaatccctccttacaagctatatgtatgcatgtataaggaggttcacgcttcttttaaaaagttttatcttaaattctcgactatattaaagcattttcaataaagcatctttgccaattattcctttaaaaatccctcttttttcagcttcaagcgttacagattcaagaggcgcttcaagaagctgctcaattgtacgtacacctacagctcttccagctattatttgacgatcagctaatttatcatttaatagacctacgtctagtgctccgcacataatgtaacctttatctgatgagattgttaacaaagttgtttttggcagtaatacggtaactgcattaaacgtatgaccttcaattacgataggcgctaaggtaatcatagtaactcactcctttcttaatcaatttatgattttgaaagaaaaaagtgaggttttacatatacttttctacctatttgacgtttatattccttcttccttatttatataaacttttataggactcagtgctaaaattcattaaaaaaatctaattgtttaggagctaaattctcatattcaatatttaataaactcataagctgtttggcattatgtacagcatctccgcccgagttattattaaataacaggtaaatgtccttcgtttgtttttgcagcttttcaagccgttctttccactctaggagctctttttcattgtaacgatacaaaaaccttactgctcgccaattgccttctgcgggcttattccaaccgtgtacgtttcgtccgtgaaaacggataagtgttttctgtttatctgtagcatgaatcacaataggaatagagccttctcctgcctgcggttcatcacaaataccgtgaatccacttctcttgttccataaacgtcagcgttttatcgtagaaaaatggcttaaaccaagattgatttcgaaactcaagcgctactggcaaatcgccaaacttctcgcggctatatctcaaataggctacattttcttttgtacagtcaaaccagggcggcatttgaaataaaatcataccaagtttattcgatgttacgtaaggcttcactgattctaaaaacgcatgaaacatttcttctttgctatcaaacggatttccttctctcatatgccctgtcataccttgataggcttttactacaaaacgaaaagattccggtgtatcgttcacccatttttctacatttgatgttggttgaattgcataaaaagatgaatcgacttcaacaattggaaaatggcctgcatatacggcaagcttgtctcttgatgaaacccccgcttcatataatgaatcatgatctccccagcctgtaactccaatataaatcatgccactcctcctctatgttcttagcttcgcttttctttattttaatacaaacgatacaaaaaaactcgtttgcataaagagcaaacgagttttgatctattattaaccgattgaaccttccatttcaaatttgattagacggttcatttctactgcatattccattggaagctcttttgtaaatggctcaataaagcccattacaatcatttctgttgcttcttcttcagaaataccgcggctcattagatagaataattgttcttcagatactttcgataccttcgcttcatgctcaagtgagatgttgtcatttaaaatctcattgtacggaattgtatcagaagttgattgattatccataatcagcgtatcacactcaatgttcgcacgtgcaccttctgctttacggccgaagtgtacgataccgcggtatgttactttaccgccttgttttgaaattgattttgatacgatcgttgaagatgtgttcggtgctaagtgaatcatttttgcaccagcatcttggtgctgtcctttaccagcaagggcaatagataatgtcataccacgtgcaccttcaccttttaagataacagctggatatttcattgttaacttagaaccgatgtttccatcaatccattccattgttgcgtttgcttcacaaaccgcgcgttttgttacaaggttgtatacgttgttcgcccagttttgaattgttgtatagcggcaatacgcatcttttttgatgatgatctctacaacggcactgtgaagagagtttgttgtataaacaggtgctgtacagccctctacatagtgaacgtgtgagccttcatcagcaataattaacgtacgctcaaactgtcccatattttcagagttaatacggaaataagcttgtaatggtgtgtctacttttatgcctttcggtacgtaaatgaatgatccaccagaccaaaccgctgagttaagagcagagaatttgttatccgttggcgggataacttttccaaaatgctcacggaaaatatcttcgttttcttttagcgccgtatccgtatctttaaatacgataccttgcgcttcaagatcttctttcatattgtgataaacaacttcagattcgtactgagctgatacacccgcaagatacttttgctctgcttcaggaataccaagtttatcaaacgtttgtttaatttcttcaggaacttcatcccaagagcgttcagacttctcagatggttttacgtagtacgtaatttcatcaaagtctaagcttgccatgtctccgccccactgtggcattggcatgttgtagaagtgctctagagatttcaaacggaagtcaagcatccattgtggttcctctttcatacgagaaatttcttctacgatttcttttgttaaaccgcgtttagagcggaaaattgatacgtctttatcggaaaatccatatttataatcgccgatttctggcatttttttagccatcttttattaccccctacttgataggattgggaatgaatgaaggtcttatttttgttcgttaagacctttttccatcgctttccacgctagtgttgcacatttaatacgcgcaggaaattttgctacaccttgaagtgcttcaatatctcctaaatctatactatcatcatactctttaccttgcatcatgtcagagaagatatgggccattttaaacgctttgtctacttcttgacctttaattgcttgtgtcatcattgaagctgatgacattgaaattgaacatccttcaccttcaaactttgcatccaccactttgccgtcctctacttttaaggaaagttcaatgcggtctccgcacgtcgggttattcatatgaatgttcacagtatcttcattcaacgttccacgattacgcgggtttttataatggtccataattacttgacgatagagagtatctaaattattaaaagccatttgtaaaatactccttcgtttttattaatgatgacaccaatttatctacttcttcttccgtgttatacagatagaagcttgcacgtgcagtagaagatacgtttaaatatttcatcagcggctgcgcacagtgatgacctgcacgaatcgcaattccatcagcgtctactactgtcgcaacgtcgtgcggatgcacatcttcaatattaaacgtcacaacacctgctcgctctttcggtccgtaaatcgtaattccatctacttgcgataagcgatccagtgcatattgcgctaacttgtgctcatgtgcttgaatattatctaaaccaacttcttctaagaaatcaatcgctgcacctaaaccaatggcacctgcaatgattggcgtacctccttcaaatttccaaggaagctctttccacgttgattcgtataggtttacgaagtcaatcatttcgccgccaaactcgattggttccattttttcaagaatctctttctttccataaagagcgccgattccagtcggtccgcccattttatgtccagagaaagcaaagaaatcacagtctaaatcttgtacatccaccttcatgtgaggtgtactttgtgcaccatccacaaccattactgcaccgttagcatgtgcaatttctgcaatctcttttactgggttaatcgtgcccaatacgttagatacttgcataatcgatacaattttggtgttggatgtaatcgtgctttttacctcttctagtgaaagtgcatgatcttctgttaatgaaatatattttaacgttgcacctgtttccttggcaacttgctgccaaggaatgatgttgctgtgatgttccatataagtaatcacaatttcatcaccaggtttaagattcgcacggccatagcttgcagctactgtattaagagctgtcgttgtaccgcgcgtaaagataatctcttccgttgattttgcattaataaacttacgaaccttttcacgagcgccttcgtatccgtctgttgctcttgtaccaagcgtgtgaacacctcggtgtacgtttgagttatattctttgtaatacttctcaatcgcttcaattacagcaagcggcttttgtgaagttgctgcactgtctaaataaacgagtgggctgccatttacctcttggtctaaaataggaaattctttacgaatatcagagatattcattatcgaactttcctttcaattaaatccgttaattgttttttaaccgtttcgattggcaactcgtttacaactggtgctaagaacccgtgaataactagacgttctgcttctgtttgtggaataccgcggctcattaagtagtaaagctgaattggatctacgcgtccaacagatgcagcgtgtcctgctgttacatcgtcttcatcaattagaagaattgggtttgcgtctccacgcgctttttcacttaacattaacacacgagattcctgctcagcgtttgatttagatgcaccgtgttcaattttaccgataccgttaaagattgaagacgcgctttctttcataacgccgtgttttaaaatgtagccttcagaatgttttccaaaatgtacgatacttgttgttaagttttgagactgctctccacgtccaactgttaccgtttttgtatctccatatgaaccgtcgcccattagatacgttgtattttctgaaactgtatttccttcactcattaagcctaaagcccactcaatgcgaccatctttgcccgctacgccgcggcggttcacataagtagttgtgcctttagctaagtagtcaacagctccaaacgttacttttgcattgctgttagcgaatacttccgtcacgatattgacaacaccgtttgactcttcagcagtcgcaatgtagttttctacatatgttactgagctgttgtcttcagctacaacaatcacatggttgaataaagctgcttcttcatcttcacggacaaatacagcttgaagcggctcttgtatttctacatttttaggaacatatacaaatacaccgccgtttaataacgctgcgtttaatgcagttaaacggtgctcatctactttaactccgtctttcatgaagtacttctcaacaaggtcgctatgctctttagcggctgtttgaatatctgtgaagataacaccctgagactttagctcttctgttaacgttgagtatgcagctgtttggtcacgctgaacatatagatttttaacagcttctgtatcaatcaatgctttaaccacttctggaagctcgtctacagatgagattgtgcttgcctgtgaagtgtgcttgtcaaaagcagtaaaattccatttcgaaatgtttgttttatctggctttggaagtgcaagatcttctgctttcgcaagagcttgtaagcgaagatctaacagccaacttggttcattagcttcttttgaaaagctgctgatgtactcttgatcaaatggtaatttcgtatcaatagtcatagagatcctcctaactcttaagcttcttgctctacagtttcgtcttcaatacctaattcttgtttgatccagtcataaccttctgcctctagacgctgtgctaattctggtccgcctgattttacaacgcgaccttgcatcataacgtgaactttatctggtgtaatgtagtttaataaacgttggtagtgagtaatcattaagcaaccgaactcgctgccgcgcagttcattaataccttttgatacaacttttaacgcatcgatatctaaaccagagtcgatttcatctaaaattgcaattcctggttgaagcatcattaattgaagaatttcgttacgcttcttctcaccgccagagaaaccttcatttaggtaacgctgtgccatgtcttgatccatttctaagaaatccatgtttttatctaattgacggataaatttcattagtgaaatttcttcgccttcttcacgacgagcattaattgctgaacgtaggaagtctgcatttgttacaccgctgatttcacttggatattgcatcgctaggaatagacctgcacgagcgcgctcatctacttccatctcaagtacatcttcgccgtctagcgtgatgcttccttgtgtaacctcgtatttaggatgtcccatgattgctgaagataatgttgatttaccagtaccgtttggtcccatgattgcatggatttcgccgcccttaacttctaaattaacaccttttaaaatttctttaccttcaattgcaacatgaagatctttaattgttaaagttgaccctgccatattaaaacctccagttatagacgtatatagtaaaaaacgatatacctatatctttttaattattctcattttattctcattacaatcttataacaaatgaaaacttatagcaaccttttgacccaaaaggttttaaaccattatgtacatttttcaagactaaatccactcataaaaaagttgccttaaaagactccatagagccttctaagacaagcttttttaccctctttatttacttagtgcgtgtggctagtcagttctgaaatacactcttggacaagcgtaacggactgactcatcgctgcgcctccgccaaatgctgctgacactccgcatgcctctagaatttcttgttcagttgcaccttgatcaatgcagccttttgtatgataaatcatacagtactcgtcttgagctactacgctgattcctaacgcgattaactgcttttcttttttagaaagagaaccttctccaaaacatgcttcagtaaacgcattaaacgtttttgttacttccggcaatttttcgctaaatttcccaacacccattttataatcatgaagtgcttgctcagttgaatgacgtgcttcttgctgcataacgtcagctcccatcatcagtaaagttttcacggttagtatgcgtgagaaaaataagagttattcgttttcccgcctacaaaaaaagcacttgcccagagtgggcaagcgcttttcttctattatttatttaccggcagtactccgcctttgtatttttctttaatgtagtcttgaatttctttagagtgaagaacttttactaaagctttcaccgtatctttattttcgtcgcctttgtgaaccgtaataatgtttgcataagggttattttccttgctttcaactgcgattggatcttttactggatctaaaccagcatcgatagcatagttagcattgataacaacagcgtcaccttcattgtttttgtacatttgaggtaacaatccgccttcaacatcggctttaaattttaaatttttagggttttctacaatatctttaatttgtgcatctattttctttacgcctggctttaatttgatcacgccagctttttcaaaaatcgataatatacgtccttgctctgctaccgcatcacgcataataactgtaccgtttttcggaagatcttttaagcttttgtattttttagagtagataccaattggctcaatatgaatggcaccggcacttacgaaatcataccctttttcacccttgtgatcttttaatactgaattcatataaggaacatgctggaagtagtttgcatcaatttcattgtttgcaagagctgtgttcggtaagatgtaatcttggaattttttaatttctaagtcaattccttgtttttctaaaatcggttttgcttgttctaaaatttcagcatgaggcgtattagatgcacccacgacaattttcttttcatcttttgatccattgttagatccacacgcagctaatcctactactagtgcagatgttaatgctaaagccgaaagccattttttcataataaataatcctccctttatcttttatcaatttttgcagtaatcgcatctccaataagttggataataaatacaataatcaaaattaagattgtagcggctagcgttacgtcattatgactgcgctggaacccttctaaatatgcaaggtttccaagacctccggctccaatcacacccgccattgccgtatagccgactaatgcaatcgttgttaccgtcaaaccggaaattaaagctggcagcgattcaggtaaaagcactttaaaaataatggtgcttgttgttgctcccattgatttagcagcttcaatcacgcctttatcaatttcgcgcaaaccaatttctacaagacgcgcataaaatggtgctgctccaacaattaaagcaggtaacgctgcattagcacctaaaatacttcctaccaatgctttggtaaatggaatcagtaaaacaattaaaataatgaatggaatggaacgaaagatatttacaaccgctgacacaatggcatataaaggtttgttttgccaaagctgtcctttggacgttaaaaataaaagcaagcccaataaaatacctagaacaaatgtggctacaactgaaatagccgtcatatatagtgtttcatttgtcgcttgaataaaatcatctaaaataacgtttggaaatagtttctcaagcatttgtcattacctccacttctacctgctgctcatgaatgtatgcaatgactttttcaacttctgttaattctccgtctaaatgaacgaacaacgttccgtatgaacctgtttgcgtatgagaaatctttccttgtaaaatattaatcgttacatcaaactgttttaaaatcgttgtaatgagcggttgctctgcttttccgccaacaaacgtcagctgaataatttgcccgcttggatacagctcttttacttgttcaatcgtttcaaacgtttcctctggttcagaaatctgttgaacaaatcgttttgtaatcggctgcttaggttttctgaatacttctagcacttgtccttcttctactactgccccattttccataacggctactcgatgacaaattttacgaatgacgtgcatttcatgagtaattaatacaatggttaaccctagcttctcattaatatctactaacagatctaaaatagaatctgtcgtttgaggatcaagcgctgatgttgcttcatcacaaagcaatacttttggattattcgctagcgctcgagcaataccaacacgctgcttttgtccaccgctaagctgcgatggataagcattttcacgaccttcaagtccaactagcttaatgagttcgtctactcgtttcattcttttttcttttgaaatccctgctatttctaacggaaaagcaatattttctctcaccgtacgcgaccataagatattaaagtgttgaaatatcatactaatttcttgtctcgcttttctgagttttccgcctttaatttttccaatatcattacctgctacctcgaccgttcctgtcgttggtgtttctaatccgtttagcaagcgaatcaaagaacttttccccgctccgctataaccaataattccgtaaatttcaccttggttaacggttagattcacattatcaacagctgttacttgaccgcttttagcctgataaatttttgtaacgtctgttaatgtaatcatatttcttcaccttctttaataaaaacttaattatgttaggttgtcctataggataaaaaagccgtaaaacaattttccccattaaaaaagcctctctgcgcatgacagaaaggctcgatatttaatcctttctctcatctttcaaagcgcatagctttgcaggaattggcaccatttcagttagtctgacggttgccgggtttcacagggctcagtccctccacctctcttgataagagttcgcaacaattattttgtttttgggaaatattcattcatttatgaacattcatgagtgtgattttagcatgtgtcagataggctgtcaacagattttgttcttgggataatatcccaatatttcaacaatcccaatggtttgctctctttcaatttcttcattttaaacaaacgtttgattatcgaagctcttcaagtacgtgctcgatggaatgaaacgcatagagtttttttaccatttcgccatttttcacttcaatcaaacaaggtacactttcaattgaaaatacttctgcttttgagggcatataatttaaattgctcattcctatggtcacaccgggcagcatcgcttctgctacggttaacattttttttgccagctgacatgtcccgcaaaaaggtgtatggaaaaagataaacgctctttgtccttcttttaactgatcgtcaagctgtttttcgctccattcttgcatgttgctcattccttttatgttaaaaattctgcattaacatcgatattggcactcagtaatactgttgctatgtgatttctaggggcggcagcaacctctcggtacattttatcaatatatagatgctctgcttccggaagctctcgtttaaattgttttcttagcttattccctgaatcatcagagtcaacgagtatgtatacctctttgttaaacgtaaagtcaataatttcatccagctttgataaactaatcgtaccgtttgtacaaataatttcaattggttctcgaatgatatcttggatacgttttttatctgattttccttcaacaataattactttttcaatttcaattagccccattttcatcacccataatcgtcagttgtatagtaacatcatttctttatgctatacaatattcgttaatgtatcacagttcacctgttttttaaaagaaatttgcaagaaagaactgttttaaaaggcagcttaagccatattgtttccataaaacaagaaaaacagcggcagttgccactgtttagcaccatcctgcttcttcatcgcagtctgtatatttttgcgtttcaccttgtttttgtacgtccgtatattggtagaacttattattttcttgcgaatatccttcttcaaagcggtattcattgccgcttgttccgtaactaacttcaccaattggctgcttatcaacatataatttcataccgccgtcatgaaatttagctgtaacgcgatctgtaacgtccattttttgtttttcaaacataaaaagacactcctttagcttgtttactaatagagtgtccagtcaaaaatttttcataaagacaatttatggaggaatattatccttcgtttgtcatttcttcgtattgctctgctgtcattagcttgtctacttgagaagaatcagatggtttgattgtaatcatccatgcttcttcgtatggagaatcattaacaagttcagggctatcgcttaagttgtcgtttactgctacaacttcaccgctaattggtgcatagagctcagaaactgtttttactgattcaacgctgccaaacggctcgtcagcttctactgttgctcctacttctggcagttcaacgaatacgatgtctccaagctcagcttgagcgaaatgtgtaatacctacgcggacaacgtctccttctgtttttacccattcatgctcttcagaataacgcaaatcttttggtgtactcatcttaatccctccaaaatatgtatcgtaatttgtttatataaaaagcgccttcaacgtggagaacactttctacaacctaaaataacttcctattaacagtgtaacgtaaaaggtaaaaattttctatttgaaaactcacttccacacgtcttcaaactgctcttctttgaaaccaagcgttactttttgtccatctgttagcagcggacgcttaattaacatgccatctgacgcaagaatagacagaagttcatcttcactcgcactgcttactttatctttaagccctaattcgcgatattttttaccgcttgtattaaagaatttttttaattctaagccgctgttctgataataagactggagctgctcttttgttggcgggttttctacaatatgaatttcttcatacgctactccgttatcatccagccacttctttgcttttcggcacgtcccacactttggatatgaataaaaaaataatgacatttcgtcaaccaccctttattttaagcttttttcgtattttaacacatcctttatcatttacctagatagaggcttcttaaacaaaaaggagctcgcaaaacgagctcctttttccttaaaccgtgaacttctctacttctagaagcgttttcgcaatctcacgctttacgctaatcacattgattggtgtatagcgcgttaacttgcgaagagacgaaagcatgactctaagcgtatcaccttgttcaacgccaattaacgtttcttttgcatctgcttcgatccgattaaatgcttcttggcaaaatacttgggtatactttaattttaagctattctgacctgctcctgttttggaaatggctttttcagtacgcaaaacagtagattccattgcatatacgttactgatcatatcggaaatattaacgagaatttcttgttctttctctaattctttgccatacttttgtgcagctaatcccaaaagcaagagcgcaattttcttcccgttttgcacaagcattttttcttgatctaacggctcatttcctacttcctgcggcataagcatcatcaattcttcttgaagcgtttgtgctttttgaagcagcggaagctctccttttagcgctttgcgtaaatatgtgcctggtactaaaagacggttaatctcatttgttccttcaaaaatacggttaatgcgggaatcgcgatacaagcgctcgatttcatactcactcataaaaccatagcctccgtgaagctgcaccccttcatctacgatgtagtcaagagattccgtggcaaacactttgtttaatgagcattcaatagcatattcagcaatggaagcggcaatttgttttccgtctttttgctgttcttctgaaagctggcccatatggtcttcgaaaagtcctaccgtacgatatacggagctttcagttgcatacaatttagaagccattgtggctaacttttcttgtgttaatgagaatttagcaattggcgttttaaactgctgacgctggttaacatattgagacgtaatttctaatgcacgttttcctgctccaactgctccaactccaagcttatagcgcccaatatttaaaatgttaaacgcaatcacatgcccttttccaatttcacccaacacgttttcttttggaacaagcgcatcttcaagaattaatgttcttgttgatgaacttttgattcccattttcttctcttccggtccaaccgaaacgcctgggaattcgcgctccacgataaaagcagaaaatttatcgccgtcgattttcgcatacaccacgaacacatcagcaaatccggcattcgtaatccactgcttttctccatttaacacatagtgtgtaccttctgcgttaaggcgagctgttgttcgagcacccagggcatcggaaccagaaccaggttctgttaacgcatatgctgctattttttccccaactgctaaagcaggtaaatatgcttgcttttgctcttctgttccaaataagacgattggcaatgacccaattcctacgtgagcaccatgagtgatggaaaatccgcctgctcgagacattttttcagcaattaaagccgaggtaatcttatctaaaccgaggccaccgtattcttccggtacatctgcaccaagtaaacctaattcaccagcttgttttaataactttacagagcgttcaaactcatgcttttctaaatattccacttgtggaaggacttcattttctacaaattcatctgtcgtcttggcaatcatcttttgttcagatgtataatcctccggcgtgtagacgcggcttgcatcgccctcttcaattaaaaagcttccacctttaatcatttgttttgttttatttgacatgtttatatccccctttgaaatgattatgctaacaactcaaatacaccagcagctcccattcctccgccaatacacatggtgacaattccaaactgctcattccgacgctgcatttcgtgcattaagctaagagtaagcttagctccagtacagcctaatggatgacctaaggcaatagcgcctccgtttacatttactttatcttcattaatatttaattcacgaataacgccgagtgcttgagaagcaaatgcttcattcaattcaaacaacccgatatcagaaagttccagccctgctagtttaagagctttagggatggcagctaccgggccaatccccattacttcaggcggaactcctccaactgcaaatgagcgaaacttaagcaaaggctttaacccttctgcttcagcttgttctttatccattagaaaaacggatgcagctccgtcacttgtctgcgaagagtttccagctgttaccgatcctttaaccgaaaaagctggacgaagtttccctaatacatccgcagttgtgccaggacgaactccttcatcttgagagaacatcagcttttgttcacggagcttattgttttcatccacttttcgaagcgtcacttccaccggaacaatttcgtcgttaaacttcccttcttgaagtgcttttgctgctttttgatggctgcgtacagcaaacgcatcctggtcttcacgtgaaattccatatttcatcgccacttgttctgctgtatgtcccatgcccatataatactccggcgcattttcaaccagctgaacattcggacgcgctacatttccaaacatcggaacaaaactcattgattctgctcctccagctaacactgctttggcttgccctagcataattcgctctgcaccgtaggcaatactttgcaaacctgatgaacaataacgattaatcgttattgctggcaccgtataaggcaaacctgcaagagcgccaatatttcgagccatattcaaaccttgttctgcttcaggcatcgcacaaccaataattaaatcatcaattggtccttcgtatccgcctgctcggcgaagagtttctttaaccgcaatggcacccaaatcatcaggtctaacacttgccaatgaacctttttttgcttttccgaccggtgtcctagcacctgctacaataactgcttctctcattttttctcccccttaattgcgcagtggttttcctttaactaacatgtgctgcatacgttcttgagacttcgcttctccaacaaggcttaaaaatgcttctctctctaagtccagcaaatactcttcatcaacttccgaaccaaacgctacacgtcctccggctaacacaaatgctaacttactagcaattttataatcatgttctgatatatatcctgaatacttcatggattgagctcctagcagcaacgttgcataccctgtttctccaacgacagggatcttagttcttacaggcggtttatagcccgtgtcatgtaaagcaaggactgagttcttcgcgtcattcagcaggtgatctccgtttacgctgatgccatcatggcgatttaagaaatttagctgtttagcttctgcagcagaagtggatacttttgcagtagcaattgtttcaaatgttttattcgcaatctgctgaagatcgagcgttacaccgttaggtaaaccacttaactgtttgatataaagctccttgttacctcctccaccaggaatgagtccgactcctacttctacaaggcccatgtaagtttcagcagaagcttgaattttagctgacggcaagcaaatttctgctccgcctccaagagccattgcaaacggagctgcaacaaccggcttctcattgtatttcaccttcatcattgcctgttgaaattgtttaataacgaattcaatttcaaaataattgtcatcttgtgcttccattaaaatcatagctaagttagcgccaacgcagaaattttttccttgatttcctatgaccagccctttatagttcttattcacttcttcaagagactgatttaataagctgataatatctagcccaattgcattgttaggagaagtgaactgcaggcacgccacatcatctcctaaatcaattaaactcgctccgctgttttctaaaatgacattattttgagagcgtaaagacgacaggtgaatcacctttttattttcttttaccgctttatactcctcatcttcgtaataaagcgtttgaccttccatttctttataaaagcttgtaaatccgttttcctgcatttgttttacccactgcggaattgctaagccctcctgctccatcttctccattgatttttctaaaccaattgcatcccacgtctcaaacggacccagtttccagccaaacccccacttcatagcctgatcaatggccacgatatcgtcggcaatttcatcttttaactgagctgcatacacaagaacgggactgatgatgttccaaagaagctggccggcacgatcaccggagtatataagcgctttcattttgttttgcagcccttttgcctgcttgcttaattccgtagaagctgtttttaacttctttctctcgacgtattgaagtgtactaggatcaagttctagaatttcctttcctttctttaaaaagaagccttgccctgacttgcttcctaaccagccattttcctgcatttgtttcataaataaaggcacatcgaatacttctttttctttgccttccactttgtcaaacacattgttggccacatgaataaatgtgtctagtcccactacgtctaacgttcgaaacgttgcactttttggtcttccaattaagggacccgtcacagagtcaacttctcccacgctgtaattgccttttaacatttcttgaacagtcacaagtaaaccgtacgtaccgatacggttggcgataaagttaggcgtatcttttgcaataactactcctttacctaatacatcttcaccaaacgttttcatatattcaacaatttctgattttgtgtcatgagttggaatgatttctaataactttaaataacgtggtggattaaaaaagtgcgttcctaaaaaatgcgctttaaaatcttctgagcgtcctttagccatttcgtggatcgatattcctgaagtatttgaacttacgatactgcctttttttcgtacactgtcaattctttcaaacagctgctgtttaatatcaagacgttccactactacttcaataatccaatcacactcgcttaactgctgtaaatgatcttcaagatttcctggcgtaattaacgatagtgatgacttcgacgttaaaggtgccggtttttgcttcgttaatttagctagagcagttgtactcaaccgatttctcacttgcctatcttcaagcgttagctgttttttttcctcgtctgctgttaatgaagttggaaccacgtctagcaaaagcgttggaattcctacatttgctaaatgagctgcaattccagagcccataactcctgaacctaaaacggcggctttttttatgttcataattatccccacatcccctttaatatattgaatgaatgatcattcattttatgcgtaaaaaaagagagtcactgttaatctctgtttttactataaaacattttttaaattttcgcaatatattcacaatattatctctaactatttttgaggtgtttggttatcttaatacacaggaggtgattttgtgagcaaattaaagaaggatccatcgtcagcaggcgtaagcgcagcaagcgttaaaggaaatgctggaccggtcaatgaaccgcacggacgcggcaaaaagacatctcaaaaccaacagtacacaaagcataacactcaaggacattaacctcaaaatcgaacatgagtaatcgaatcatgttcgatttttgattatttcttactttgtcatcacgaccatttcattattatttttttacaattccttttaagacaaatgcgacatttgcaggtctttctgcaaggcgcctcataaagtacccataccagtccgttccataaggaacgtacactctcattttatattgttctgctacgagctgaacttgcctttctgaccgaatgccgtatagcatctgaaattcaaactgattcattgaaattccatgctttttaacaaactcttttgcatactgaatgattcgttcatcgtgagtagcaactgctgtgtagtgaccgtttaataagtggagcccaattatgtttttgaagttttcgtctacgtcttctttatcaggaaacgccacgtctgctgcttctttgtacgcccctttcactaaccttaatttaggagcataagcatctaattcacggatgtcactttctgttcgatataagtatgcttgaagcaccgtccctacgtgttcatactcattttttaattgtttaaatagcttaatcgtcttgctgcatcgcttataatcctccatatcaatcgtcacaaatacgctatatttttccgcttcttcaagaatacgccgcatatgatgaagtgccaaatcctctgaaatatccagtcccatagacgttaatttcaaagaaatttctgaatctaacctttctttgtgtataaggtgaatggcctttatgcattgagctgcggcatgatcaacttcagcttcactttccacaaactcgccaagataatcaatcgttacttttaatccctgttcatttagcttttttatcacactaacagcttcatcgatggtttcccctgcaacaaaacgtgctgctccaaaacgtaagccatagcgtttagccagctttgttaactttttgctttttgataacaataaaaaaaagtttcttatcgtttgttccaaagcaaccccccgccttcacttgtcatacgcctcacaaaatttatttaattatcattaattttaccattttccaaactagatagataggcaccctttattaacctatgcatacaaaatcaaaaagcgaccgagagcttttggataaaaaaacatccatcagcttcgtgatgaatgtttttattctggttttcgctgtgacgctcgatgcgcttcattcagctctttgatttcctttacaatctccaccatttccgcttttgcttccggatataattgattccaatgctttgttaaaggaggcatggattttgagatatggttgtaaagtgcccacatttttactttttcctgcagctgttcgtcactttgaccaaccattagttccgtatacttttcaattaaaccgtcaaattgctcttgaaaggttttactcatgcacaatcactcctttctttggtttacaaataaccggacaagtttgacaataagtctttttagctcctgtttggtaagataaacagcacgtttgccgaacccttatctcctgcatttgcttctctacttgaagaggtgaactgtacctagcaaacggattatgatggtatgaaccaaagtgatgaccctcagcttcttccaacaaatatcgtaaattcttttgtacttgtacattttctatttcttcatttgctaaaagcaaatcataaagccagtggatataaacagctacgttttcccacagcgtcagctttgaaatttttgtcactttacgcagtgatgaccatatccgctcaatgtgatgagcaaacaattcatcaagaagttcatcaagaagaattttccgattgtcctctgttacttctttggtctcaatttctgagatggacacttttgggagccagatcgtttcagcgtcttctgtatgcaacgaaacatttttagtcgatgcgtttatctttttttgaaacacaataaatgaatacaaagccgccaccacaacaaagctataccgcttcgctaacatagaggcagctgctctcaagttatcagcctccatcgtctgttgaatccatagcagctgaatcctcagcgtgctttcgtccatgcagctggagggagacaacctatacagcgaattatctttaaacgtacagcggaatttttctgctaactcgctttgctctttcttattgagcatgctgcgtttcaacgcgcagcttattcacaatacatcgtccgcgcccatgaggaatacaaagaggcgttccaaataacggatccaccgtcacttcacagttcatattaaagactcgctgtactaaatcgcagttaatgacttcttctggtcttccctgtgcatagatttttttatcttgaagcgccacaatatgatgagcatagcggcaggctaagtttaaatcatgcagcaccattacgatggtacgattttctttttcattcagttcaaacaacaagtccaagatctcaatttgatgcgtcatatctaaatacgttgtcggttcatcaagtaaaataatatccgtatcttgtgctaatgtcatagcaatccatgcgcgctgacgctgtcctccagaaagcgaatcaacttgacgatcagccaagtctgctaaccctgttgcttcgagtgcattttgtactttttcttcatcttcttgagaccactgacgaaaccaattttgatacggatagcgcccttgtttaacaagctgaagcactgtcagcccttcaggtgcaacaggaccttgcggaagaattgctagctgctttgcaatttccttggtaggaagagaggaaattttagagccttctagcaaaatagagccggcatgtggctttaataatcttgctagtgaacgcagcagcgtagattttccgcatccattactgccgataaaaaccgtaatctcaccctttgggatggtaacgtcaagctcatctataatcatcgcttctccatatgataatgttagcgattttgtttctaacgaatgcatgcgaatcgctccttctacaaagaatgctatacgtttctttgtttgtatagtaaataaatgaagtacggtgcgccaattgcagctgtaaatacacctgctggcacttcgattggcaagaaaaatgttcggccaattaaatctgctgctgtgattaaaatcgctccgattagtgccgatagcggtattaaagctccgaatgaagaacctaccagctttcgggcaatatgtggagcaagcaatcctacaaagctaattccgccggcaaatgcaacggcgcttcctgttaaagctgtactcatcagtaatagtgccaatcgatttttttgaacgcgacttccaacgttagtcgcaatttcttcacctaattcttgaacatttaaatttcgaatcattaaaatcgtgattataaccagccctattgtaacaggaactagtacggaaacactggcccagtttgagccatacaccgttcctgtaatccaaatatttgcctggctggcgcgatagataggacccataatcataaacagcgtggtcatagctttcgttaacgctgttaatccaattcctattaatactagtgtaataggagagacgccatttttccaggcaaacacataaagtaaaagcgccactgccaatgcacctaaaaatgcgctaacaggcatccaattaatacttacggttaacgagttgcttttatcactaaatagtgtcaaaaataacactacaccgactgacgctccccctgttaatccaatcaagtctggtgaagcaagcggatttcgcacaagcccctgcaagatagcacctgcaatggctaaacaaataccggcacaaatggcaacgataatgcgcggaagtctaaaggaggtaacaactaaccgttcaaactccagtccatgacccgctaaaatgttaatcacacgaaagggattgataaataagtcacccgtacctgcacttaataaaaaaagagcaataagtgcagctgaaaaaccagtgataatcaaagctgcttttatgttaactaaaaatgaaatccgctttaagcgaagagataagtatgttttcatgacgccttggcccctttccttgccatatagataaagaaaggtgtaccaataacagcagtcatgactccaacagggatttcttgaggcataatgacatacctggccgcaacatcagctaataaaattaaaatcccgccggcaaccgcactatagggaaatacccagcgataatcttgtcctacaattgctcttacaacatgaggaacaatgattccaacaaagctaatcggaccggctactgcaacggctccaccagctaaaatggcaataatgatcccgcttataattttcacaagagccgttctttgacctaatcctttagctacatcttcaccaatcgttaaaatattaatttttgaagcaataaaaaacgtgacaataattgctagcactacataaggcagtatgccatacagcatttccaccttgcgcccttgaacagacccagccagccaaaagagaacttgatcaagtgaagattcatcgacagccagcagcccttgtgttaaagaagagaaaaaggctgcaatagccgctcctgcgagcgtcaatttaataggcgttaatccttcttttccgatggacccaagaaaatagacaaccactacggttaatgccgctcctacaaatgcaatccatgtaaaagcttgaagtgaattgaccgaaaaaatcatcactgcaacaacaataaaaaagctggccccagcgttcacaccaataatatctggtgaagcaagtgggtttttcgttaacgcctgcatcattgctcctgcaattcctaaacaaatacctaccacagcaccaattatagcgcgcggcaatcgaatattttgaataactatgtgctcattcgaaccgttaaacgcttgaaaagcttcaaatgctgtcttgatacttgtatctgtgtatccgagtacgatacttaatccaatacagattaaaagcagcatgattccaatgatgagccccattactttcatttgaacactgcgtagcatcattttcattgctctcctctaagatgattcctatatatatctaacctttagtttaggaaacattgaaaaaagtgtcaatgattttgagaatcattttcaatttttaattgacaccgcttaaaagttagaatattatcttaattgttaatgaaaatcattatcacttaagaggaggaagagatgtgaatacatattctaaaggcaagttgtcatatttgttatccattcttaccattatgacactgcttgtgctggcagcctgcggtaattcaaacagcgctgacgataataaaaaagaaaaaactgagggttctggcgaaacttatacagtaaaacacgcaatggataaaacagagattaaaggaacacctaaacgagtagtcgttttaacaaacgaaggtactgaagctcttcttgcaatgggtgtaaagcctgtgggtgctgttcaatcatggttaggaaatccgtggtatgaccatattaaaggtcagatgaaaggcgttaaaagtgtaggtacagaaagcgagccaagcttagaagcaatcgcagctttaaaacctgacttgattatcggaaataagatgcgccaagaaaaagtatacgatcagctgagtcaaattgctccgactgtattttctgaagagctgcgcggagactggaaatcaaactttaagctatatgcaaaagctgtgaataaagaggaaaaaggtaaagaagtattagctgactatgacaatcgcgtagcagatttaaagaaacgtcttggtgatcagttaaaacaaaaaatctcagttgtacgctttacagctggagacgttcgtatctatcataaagattcgttctcaggcgttattttagatcagcttggctttgctcgccctgaatctcaagacaaaaatgattttgctgaaatgaatgcaacaaaagaacgcattccggcaatggacggcgatcagctattctacttctcttatgaaacgggagacggcgaagcaacaaagcttgaaaaagaatggataaacgatccgcttttcaaaaagttaaaagtagctcaagaagaccatgttcataaagtagatgatgctacttggaatacagcaggcggtgtgttagcagctaatatcgtacttgatgatattgaaaaaatcttcttagataaaaaacaataatactatgaaagaaagagcttcgacgaatcgaagctctttttgcatgtataatgtatttcctttcatcgcacactaaccgtggtctcactttattaaataggagtggtgaaaatgaattcaaaaaaacagcctaaaaagcagcctgatacaaatgaaatggctgaccgtcagttcgaaacagaagattataaccgacaagatgcactctcacaaggcctagcagaaacacatgagcaagtaagcgacgcctatcaagaaggatcatttgaagatacagatcgttaataaaaaaagagctgactctaagtcagctcttttttattttgaatgctgccatgccgttttaggcaatgacatggacatccactgctggcgctttgatttatcaatcgttactttctttgctttaattccttgttgaatcagctgtttcattagtttatcaattgacttcatcgctattcacctcaaaagcggaaatttgttttgcttctacttttttacttttttgcgcttaaacttcataaaaaactcatagacaattggaacgataatgagcgtaagcagcgtagaacttgttagtcctccgattaccgtaacccctagcccttttgaaataaggcctccaccttcaaatccaaacgctaatggaagcagtgcaccaatcgttgcaatagctgtcattaagatcgggcgaagacgtgtcattccagcctctagtaacgcttcacgcgtcgacagaccctcttgctctttatgaatcacgcggtcaatcagcacaattgcatttgttaccacaattccaatcagcataagagctccaatcatcgaagaaatgctgattgtttctccagagattaacagcgccactagtgcaccaataagtgtaaatggaagtgagaataagatagcaaacggtgctagccctcccccaaatgtcagtactagtacgaagtacacgataccgatggctgcgagcatagcaattcctaattgactaaatgagtcattaatttgctctgatgctccgccaaagttaatatccatatcacttggcaaatcaattttcttcacttctttttggacgttagaagaaacgccgcctacatcgtcactcttaatatcggcacttacctctgcataaattttattatcacggcgagttaccgtattcgatgttttaccttttttaatatcgacaacttcatttaatgtaacttcctgtccagtttgagaggtcacttttgtgcttgaaagttcggcaaaagtagagaaatcctctttttcttttggaaggtatacgttaatttcgtttccatctttttggatagtcgttaatacttcacgctgtccaaggttcgaaatttgcatgccgatttgactagcagacaagccgagttcagcggctttcttttggttcggtactagcgtatattcatcaaacgtatctgaaagcgtagaatcgacatttttcagttctttatgcttttctagaacatgctgaactttatcagcataaggtttgatttcatctaagctatctccgtaaataaggacgtttaatgaattattgctgccgctagacgctgtattcattgagccccattcaccttgattcgcttgtttattaagagcttttaatactttatcctgctctttatcaaagttttgtgtatcctcgtcatattgcacaaatgttaaaacgttatttttgcttcccggattaaacgagttgccttcaccgaacgaatactgaaccgttttgacaccatctcgcttcatcaagtacgcttctgcacgatttgctgctttttctacgtcgctttgagactgtcctgctttcggtgtatacgtaagcgtcagcgttttttcttgatcggatgacaagaagctcacgccaatagaaggaactaagaataaacttcctactaacagtaggacggctaatccaaaggaaataagcttatggtttagcgtccagttcaaaattcgcttatatccatgcgctagtttgcttggcttttcttcttttacttttacatttgttttaaataacgaatgagcaagcattggcacgagtgttaccgctactagcagtgatgctaacagtgcaaaaacaaccgttaacgcaaacggtaagaatagctctcctaccggtccttctacgagacctaacggtaagaatacggccacggttacgactgtagaagagaaaattggaacaaacatttctttcgtcgccgcaacaattaaatcttttcctttaagcttttcttcctgataagccatgcggcggtaaatattttcaataacgacaatggaatcatctacaacccttccgatggctacagtcatcgctccaagcgtcataatatttaaagagatatccattgatttgagcgccaaaatggcgattaatagcgaaagcggaattgaaataacggcaataatcgttgaacgaatatcacgtaaaaataaaagaataataataaccgcaaagaccgcaccgataatagctttatttagcatcgtatgaacagaatcttcaatcggtttaccttgatcaaaaatattgtcaacgtgaaggtctttatttttcttttctaggctattcattttttctttaatatcatttacaacatttactgtgttcgcatccttcgctttgacaacttgtacagcaattgaaggttttccgttcgtgcgagaaatggattctgctttccccatcactttaacatccgcaatttcttttaatttcacagttggaatcgaagctgcggacggcacctgctgtacggctccttgtgtctgctgctggctcatttcttgttgctgaccttgagcagctccttgactaggcacagctgggatctctaagttttccaaatctttttctgttgtcatctttccgtctaccacaacagatttttgagatccatccatcgtatacgtaccagccggcacttttgcatcggatgcttggatcagctttttcaccgtatcttcatcgagtcccagctgcttgagcttgtcttgtttgaatacaagttctgcttcttcaacttgttctcctgacacgctgaccgaagaaattccctgcactttttcaacttggggaacaacggtattttttacatacttcgttaagccttctaatgattttttatcatctgaaacacttaatgaaataatcggaaaatcactgatgctttgccttgaaacatttggttcctctacatcatctggcagatctacgtttgaaagagctcgcctaacttcgtcttctgccttctccatatttttactaaagctatattcaacttgaatagtagccatattttcataagaagacgagctaactgtgtcaacaccgctcagtccctgaagcttttgttcaatcggcttactcaccttatctgccacttgttccggagtggctcccggataagttgcactgactgttacaacaggcgttgaaatatcaggaatggtctctagtttcatattaaaccctgaatacagccctgcaataatgacaaagagcgttaacagccatactgcaaatttatttttcaatgaaaatttaataaacttccccaatgcatatcctccttcaaatatatgtatactaataaaattgactgatcggtcacaacaacttaaaatataaatgactaactggtcagtgtcaaccctaagcaggctctctcctaacatgttcataataaagacatatttacgataaatcgttttttaaaggaactgactcccggttttaactttgatatatacctttatcttttttagtgtatgatactattatctaacgaaatgaatggctaaattgttcaataaaggaggtagaatacatgaaagaaaaagaaaagagaataattgaagcttcgattaagctttttgccaaaaaaggatttaatgctacctctgtgcaagaaattgtagatgaatgcaacatttcaaaaggtgcattttacctgcacttcaaatctaaggatgcacttttattatcaattctaaacttttactatgaaaagctctttagctctgtttatgctctcgacgaggaagtaaacgatgcccgcagccgctatatgaatcagcttatctatttctatgaatttattacggagcatagagattttattatcatgcaaattcgtgaaaaatctattccatttaacaaagaagtggagacctttgttcataaaatgcagcgagaaacgttttactttcatcgcaaaagcctcgttagcgtatacggagaagacgtaactccttatatctcggatttaacgaaaatgattgaaggtattcatcattcctttttagaaattattatcttcaatcaatacgagcttacctttaaagaagtagcacagtacataatggaccgagttgatgtattagtagaagatttattggctagaaaacctcgtccccttattcccgcttcttttggtgaagatatatacggaaaggaacgaacgacttttctaagtaaaaatgagcaggtaaaacaagttcttgaggaaattaaacatctgctagacaccagcgatcatatttctgatgagcacgcagacagctttcacattttacaaacggagctaaaaaaagataagcctaccgctgctattgtaaaaggcatggttggaaatttaacggaacttaaaccgttggaagaaccgcttaatcttttaacagccttactccaacaaaaataacagaaggcttcaacaagccttctgttatttttctgtttttgaactagatactcccccagataacacgaacttcatggcttcttccggcttaatatctaaccattcaatttcttcttttggaatcaaaaaagtaaaaccagctacttgaaaagtttgtggaacatagacggctacgtggtcttttaacgagtgaatcacctcttctacttcttcagaggtcacaaaccctataactttcattgacgtgccgggcatcgtcactaaagcgacttttgaaaaggactttttctctccaagaaaagattgaaacgtatctttaataacggtatatagcgttttaacaagcggtattctttctaacaaccggtcaattaagttaatgattttccctgcaaaaaaacgagtggataaccatcctaagaacgtaattaaaagaagagtcgctaagatcccaacccccggtatataatcctgcttcatatagggcttcaatacgtttcctaaaatgctgtctaaaaaattaaacactcttaccaaaatataaataacaaggataatagggacaatcgttaagagtccattaataaagctttttatgattgctttcatgtaaacacctcattttttctgacatactgctgttcattatacaatggatttgccttatctgcgtctctttatttttattcacatatgtataacctggcaacgttttatcaaaataatagaggaggacatgaacatacatacctattacacttatttttgcggagggatacaattggaacgtctaaaatcaaaagtttctgttattacagggtcaagctctggcataggaaaagcaaccgctgaacgctccgcgaaagaaggtgcggtattatttttagcatccgatgacagctcatatgtagcaggtcattgcattgcgatagacggcggtcataggacttatacatggtctaaaaaaatgctttacagtaaaatgtggtaataaaaccagctctataccactaggtatagagcttttctgtttgaattttttctttaaaatagacgtgacattatgtcaagacaggtgtaaacttaaagcaaaattctttgcttctaggaggaagacatgaaaacaaaacaattatcagaacgtcagctgcttggcatcgcagggctcggttggctcttcgatgcaatggatgttggcattttgtcttttatcattgcagctcttcacgctgaatggggactttcccctactgaaatgagttggataggcagcgttaactcgatcggaatggcggttggagctttggtgtttgggttactggctgatcgaattgggcgaaaaaccgtttttattgtaactcttgttcttttttcagtggcaagcggcctttcagctcttactactacccttgctgcttttttagtatttcgatttttaattggaatgggtttaggaggagagcttccggttgcttctacacttgtttctgagacggtggcgccggaaaaacgcggtaaagtggtcgtattattagaaagtttttgggccttcggctggctgctggcagcgcttatttcttattttgtaatcccagcttacgggtggcagctagcgcttatcctaacggctattccagcgttttatgccatttatttgcgcattaaactgcccgattctcctcagtttgtagaggcgacaaaggaaaagaaaccgtcgattgcggacaatgtaagaagcgtgtggtctaagccttatcgtcaatctaccattatgctctgggttctgtggttttgcgttgtattttcatattacggcatgtttttatggctacctagcgtcatggtcattaaaggatttagcttgatcaaaagctttgaatacgtattgattatgacattagctcaactgcctggctattatacggctgcttggtttattgaacgcatgggccgaaaattcgtattggtcacatatttgttaggtacggctgctagcgcatatatctttggaaatgccgagtcactttggctgctgctaacagcaggtatgctgttgtctttcttcaacttaggtgcttggggtgctttatacgcgtatacacctgagcaatatccgacatctatccgaggcacaggagctggaatggctgcttcttttggacgaattggaggaattttagggcctctgttagttggatatatgtcaacgcaaggtacgtctttaaccgttacgttctcaatcttttgtggagctattttaatcggtgttggttcggttgtttttctaggaaaagaaaccaaacaaaagcagctcgcataaacaaagacgctcttttagagcgtctttgttgtgcttattatttattttctaccagctctttttcatctgcctctacttccacgtcacgctgagcgaatactttcttggctacgcttaaagcatttaacacgcgagggaagcctgtgtatgggattaactgaataatgctctccacaatctccttcggctctagtccagctgttaaacctgtatttaaatgcagctcaagctgaggctctgtaccctgagtgaccaatgatgaaatggtaactaatgctcgttgcttattggttagacccggtcgtgaataaatgtctccataggcaaattcaataatatatttcccaacgtcaggagctaggtcttttaagtcttctgtaatttttaaatgagttgaaatatcatcgttactcgttaatgtatattccattaatttatctaaacctttttgataactatcttgtgccatgtaaaatcaacctccgtattttttactgacaccgcgcggaatcaatgtttgttttcttgtatgttttctacactatctactttaacgcacattctctctttcgtaaaatacatatcttcaatacaacatatgcattttatctatataaagcagaatgctgttcattcatatagtgaagaaattgcttagaggcatatgaaatatatttatctttttttaaaatcaatcctaaatcccatgaaattgaagggttagtaataggaactgcttttacaatagaggaatctacttttgccgcaatggactgtggaaagatagatactcctaagttttcggcaatcatttcaccaataaaatcccattgagagctctcgtaagctacgttaggttcaaatcctgcttgttgacatgcatgaataagccggtcgtgaagcgtaaaatcttcattaaataaaataaatttctcttgggccaattcattaatttccacatgagttttagaggctaaaggatgggaattgtgaacatataaaagcattttttcagagataaaaggattactatcaaaaagatgttcatttaccggaagcaccgctacacctaagtctaactctcctttttctactgctttttgaacacggttggctccgtattcaataagtttaatcgtaatatctggatagagctgctgaaaccctttgataatctttggaaagaacagaactccaatcaatggaggaattccaattttaatcatccctttcttcagattcatcacatcatataaataagtcgatagctcatcaatggatgccatgactttttgtccttgcgtatacaccacttccccggcgtccgttaaatcaatctgtcttgcggaccgatcaattaattctacttccaattcttcttctaagtttttcaccattttgctcaaggtcggctgtgaaatatggagactttgagatgctttagtaaagctccttaatttagcaacttctaaaaaataattaagctgacgaatatccatctctgctcctcctatagataaagcgaatatcttttatattatttattcattttacctattaagttttaagatatacagcaaaaatataaagaagagatggagacataataaatcaattcaatctaaagaaggacaaatgggataaaggcgctagtatgaccgcttgtgacaccactgttgctttccgtgggcggtcgccgagcctcctcttcacttgcgctcctacggggtctcacctgttccgattttcccgcaggagtctacgccttgccctccaatcaacacctagaagctactacatgcatgaaacctacgcttactataacaacaaaaaatccgaacgattcatcgttcggatataccttcacctaaaatactgttgtcccgtcctcttttacgaatatgatttaaaatgttttggctgattgtgctgcttgttctaggccactttcaataatttcttgcccacgatctggaaactgattatgtccctcaataataacagagttcacatctgtgattccaaagaattgaagtacgctgcctacatatttaacggccatttcgacctcagctgctggaccttctgaatacactccgcctcgtgcatttaataacatcacttttttatcgcctagtaatcccaccggaccttctggcgtatacttaaacgttttgcctgcttgatttaaataatcaaagtacgtatgaagcacggccggcacagtaaaattccaaagcggaaaggcaataacaattttatctgctctcacaaattgttctaagtaataattagcagtttctgctgctttgttttccgctgccgtcacttctagccctcttgctaatttaaaccgaccgtttatcatgtcggcacctaaataaggaagttcttcttgaaacaaatttagctctattatttcttcatcttgatgcgattgttgatagctttctaaaaatgcatcatataatttcacgctaaccgcttcacttgccgatctgtcatttgcttttataaaaagagtataactcatactaaaacctccactgattgttgataatcttattttattcgcttttttcatgcgtttcgaacgactttataatgaaataccttcatactttagtctgagaaaaataaaaagatccgaacgatttatcgttcagatcttccttccactaaaccacttttcccccaatctcctcatttttcaacgggaaggtgaatcacaacttcagttcctttttcttcttcacttttaataaaaatctcgcctttatgctgacggacaatagtttgtgcaatcgacagtccaagccccgttcctcccgtagctctgcttctggctttatcgactcgatagaaacgttcaaaaatatgtgcaagatcttcttttggaatgccaattccatagtcttttactttgataatgacatcttcctgctttttttcaacggtcacttcaattttatccgtactgtatttaattgcattatcaagcaaaataatcaatacttgcttcatttttagttcatccacttcaatcataatgggcgtttgatcataatgaagaactaattctcttttatatacctgctgcagctgcttaacgatttgttcaaaaataagaacaagatctgtttgcttcagatcaagcgtttgttctttttccacacttgccagatcaagcagcgtttcaatcattttttgcattttggttgcttcggcatagatagtgtcgatcgcatcgagcgtaatttcttcatttttaatccctcttcttcttaataaattagaataactgcgaataacggttagaggggtttttaattcatgagaagcatcggaaacaaactgattttgcttttcaatattttctcgcaagcggtcaatcatatgattaaaggtaacggtcatcccctgcagttcatctctcgtttcggtttgaataaggacttttttaggaacaccgctctcttcgatctctttcatcgttgtgaccatatttttaataggatgcataatgacgcgtgataaccatcttcctcctaaaagagacagtaaaatggacacaagcgaacaaaaaatcaaaattgatagcaaaatatctttacgggtttcaaaaccagtcaggagctcaccaatctcaagcgtttcaacgacttgattattgactttgacaggcatgcgaataaccaatacttgcttttctctgattttgcgaagtttcaccttttttttctttgaaaattcgggcttaattttcaccagatgagggtcatttgatacctggttaatgaccgtagaattttctgagactgttcggataaatgaatggttggtcaaataaaattttagtaactcgggcgagagctccacggaatgatcttgctgacctttttgaataatctcgcgtgctttttcgaataaaatgtcctgttccatattcacggtagatttagtaaaggagaaaaaaacaacgatgttcatgattaataaaataaccactagccatgctgttgtcagtaaattaatcttcgtcgtgatcttcatgtttctcctctttcatcatatatcctacgccccgcaccgtatgaatgagagaagtagaaaaaccttcatctactttttttcttaagtggcgaatatacacatcaattacgttcgtttctccttcatattcatagccccaaacgtttgtgagaattccttctctcgtgacaattttatttttattcgtaagcaaatacacgactaaatcatactctttcggtgtcaacgtaatggattcattgtttcttaggacttcccttgtttcaagattaatggtcaaatcactgatcgttaagagctccgcttcagcttctttcgttcctgatgcttctacgagcgaacgatagcgaatacaagagcgaacccgtgctaacagttcttcaatttcaaacggttttgtaacataatcattagccccttggtctaagcccattaccttatccagcgtcgtatttctggcagttaataaaataactggcgtaaatacttccgctttccgaagtcttcttaacacctcaataccactcagacttggaagcatcacgtctagcaaaatgaggtcatattgagcggatgttgccgtctctaaccccgctttcccgtcgtactcaacatctacttcataatcttcaaattccaattcaatctttaacactttcgcaatttgcgcttcatcttccacaattaaaattttctctttcatgttatacacctctcaccacatgtcttaagtgaaagaatagcttctttagataaaaaaacaacatctttttcaaaagatgtttgtttttttatctaaaccctactttttcaacatacttgtcttttagcttatccttattgtttgtaaacatgaatgttttacgcatgaagaccaatcgtttgcttttcgcctaaaatccaattgactactgctaaaagttcttcaggcgtttgtgcttcgatttctttatggtaagcagcaatcgcgttatataatgtgctcattttatcagcatcctgcagcactgcctgcagctgactttctaacgattgatccgcctttagttcttgaactaagtttcgttctgttaaatagcgtaaattcacttcttcttgacctggtaaagcagaatgaacaaaaatcggtaaattcttgcgaagagcttcactgaccgtgataccacctggctttgttacaatagcatccacttgttcatacagttcattcatttctgtgcgtgatgaaatgtacggaatcggtgtaacgtgctgtaattcccatcccttgatttcttcatatagcttttgatttttgccgcataagacaaagtaatgaaaatggctcgcatcttttaaatcattgtagaaatccataatattgcctaaaccgctgctgcctccagcaattaaaatatttcggttaccaggatgcttaaatgttcttgtttttgttatttcttcatgtaccggtattcctgtgaccatcatattttgaagtggaatttcactttgagcacgaagtcctttttttacttcttcactagggagaaagtgaaaatcaatctcttcttttccccataaattattaataaagaaatctgtgtagacatttataataggtacatcgcacttgccttttgcttttaattgactgagcaaataagaaggaaacccatgtgtgcatataattaaatccggattttcttctttaactaagtgctccattttttttgcgaatacgtgatgataccatttgaatgaatgaacaggcggttcataaaagagatgtttgtatgccatattgtacgtttctggagcataacgaatccatttcaaatatgtgcctgtgaccactttttctaatagttcgtttgtatagcttaataaatctatttttttataacaaatatttgttgttcttctttccaatatatccattaacgcctctgccacttgatgatggccagaaggcatttttagaagaggtaaaaataaaacctttttcaactgtttcatctcctattctaaaagcagtttcttcctctcctttttatatcattaaatgcccttaaatttcagattttaattgatttttaatgtgaaattcatcgtttttttagagtgtcaatctaaactaagagtgaaaagtactgcataaggagaaaacaaatgaacctcaattacgaagtatttcaatggattaactcgtttgctggtaaatccagcgcaatggattctgtaatgattatcatcacgaatagcgttccttattttataatggcttgtttgcttttgctgtggtttagcggaaaaacagaaagaacaatttatcaccgttatacagctttatacatgttgtttacaattgtactttctctatgtatcaacgaagtcattcacctggtgtattaccacccgcgtccgtttgtgactcatcacgttcataagctgattccgcacccggctaattcatcttttgtgagtgatcattcgattttagtcttttctgctgcttggattatgtggttacgaaaaaacaaatggagaagcatcatttttatatgggctgtcatttcgggcctttcacgtatttacgtaggcgttcactatccagcagatgtacttggagggatggtgattgcgggagctatcggatgctttattatatacgtttcagctaaaacaactcctcttattcagcgattattctggattcacgatttgattatcaagcgtattccgtttctatctccctatacgcatgaacaaattagcaaaaaaaatcattcagcttaaagaggctgaagcaaaaatagtttagctgaaatgaaaaacgaaccactaatcaaacagtttgattagcggttcgttttttttgttatggtgaacgtagattttatccgtttcgttccttccagcagttgattggagggcaaggcgaagactcctgcgggaacagtggaacagatgaaacccgcaggagcgcaagcgacgaggaggctcagcggccgagcaagcagtccagattatatatccagattgttcgcctttggatgagattcatttcgttacgtctcagcctctttctttattatttttaaaaaacaacgttcactttcttgactttcacttttatttattttatattatttgatgtatcaaacattgatgtatcaaatattaattcatcaataaatatcatagaaaaaggagcgactttcttgtcacattcatgttctgaaaaagcaaatgttctgtatgctctgcaagaagttaataaacaaattaatcaaaagtttgagcattgtaccggtgttagccaatcacgtcttgatattttacatcagctttatgaaacaggtgaaatgagtcaaaaggcgcttcaacagcaagtaaacattgacaatgctgcaattacaaggcatttaaagcaactcgaagaaagagatgttgtatcacgccgtaaaaaccctgatgacaaccgcgtaacatttgtaaagcttacgaaaagcggacatgaaaaaatcggtgcatttcgaaacgaaaaagctcgctttattgatgaagcatttaaagatttcagcgaagaagaacagctgctgctttccaaaatgcttgagcgtttaaaagtaaacatttcggccattgaacggtcataacatttttaacataaaggagagttcatcatgacgcaaacaaaaacactaaacaatgatttccaagatattattacagggcgcagatctattcgttattacgacccatctgtcaaaatcagccgtgaagaaatgaaagaaattttaaccgaagcgacgctagctccatcttctgttaatgcacagccttggcgctttctagtaattgatagccctgaaggaaaggcaacattagctccgcttgctaaatttaatcaatcacaagtagaaacatcagcagctgttattgcgattttcggcgatttaaaaagtgaagaaaatttagatgaaatttacgataaagctgttgaactaggctatatgccacaagaaattagagatatgcaaattcctaaaatcaaagcgcactacgcagctgcttctgaagaattaaataaagaaacagtattaattgacagcggtttagtatctatgcagttaatgcttgctgcacgtgctcacggttatgatacaaacgctattggcggttatgaaaaagatcaaattgccgaagcattcggtttagacaaagagcgctatgcgccggttatgttactttcaatcggcaaagcagcaaatagcggttacccgtctgtacgtttaccaatcgaaaaagtagctcaatttagataataaaaaaaggtgctgtatattcagcacctttttttatcctccactaacgggcggaataaatgcgacggtatctcccgttccaatggtttcttcatctgttacaaactcttcgttgactgcggtcatcgtttgcttcagagaggacagcttatacgttttttgcacatattcctttaattccttcactgttatatcttgcttatcaactgttacttgttccactccagcctcttcacgtatagcagcgaaaaataagacgttaatcatttttacatctccttcattggctttccttcaggatattcttttgtttctaactgatctccaatccattttgttccgtcttcccaaaattcctttttccaaattggcacaatttgcttaatacgttcaatagcatactcgtttgcttcataagctgttttgcgatgcggagaagaaacggcaataactactgcgacttctgttatatcaagcttcccgattcgatgagtaatagctgtcaaagcatcgggccacttttcctgaatttcgtcaccaatttggctaagcattttcacggccattggcacataggcttgatattcaagagagagcgtcttcttgccttttgtaaattctcttaccgttccaataaatgtcgtaatagctcccgcgtctcttctagaaacttttttaattatttcatctacggcaattggctgatttactacttcaaataagtgctggttcatcttctttcccccacttctttcaataaaaaattaagataaagctcgtcttcttgtaagtgaaatattggatatgctcgctgcaattcttttttaagcggaacgtgactgatcacgcatataatattagttagagaggaaagcagaacaagatcttcttcacttcgaatcaagactgcttttggataggattcttttttatatccttcaacaaaaatgacatctggcgagaaaaattgataaaaatcaatcagcttttttagggtccagtctttactatctgccgtaagctgaaggattccacctccctctatacctgccacatcggcacctgcttgctggtggcgatgactgtcttttagctcactgctgctatctggaggtccgccgtgtccatggtgcttaatagaacctacacatagattgaattgtttcgctcttttaatgagcttttccactaaagtagtttttccgctgttttgaaatccaactacttgtaaaacggtacaacaagctaccaaggccattcacttccccgcatatcatctagcaataagacgtcaaccagcattccttctttgtatcctctcgtccctccaggaaatataattaatgtatccgcatgagctaaagaagaaacagcactagattttgtaaagcttaatggagaagcaatcagctgtccttccctgtatgaaagcctgccagatacaaatcgcataaaaggatttggctttaagaagtcctttcctaacaaagctttttctttccgaagatgaggggttcttttacccgcatatgtactgattaccggacgagccagaagttcaaaaccgacatagcacgctgtaggatttcccgagaggccaaataaaagcttttcttccatacgagcaaccgttgttacactgcctggtctcattgctattttattaaaaagaacttcggcttgtaattgtttatacacatctggtagataatcatagtctcctactgaaacgccgcccgttgtaatcagcatgtccacttctgatagtgcagcttttaccgcattgtagcactgacttaaatcatcaggcataataccaaaatagttcacttcgcctccagctttttcaatttgcgcacgcagcatatgagcattgctattacgaattttgccccgttcaacaggatcattcacttctactagttcacttccagttgcaagtaatccaactacaggttttttgaagacagctacattactatagccaaatgtggctaaaagagctgctactccgggagtaatatacgttccttttgaagctaacacagtgtcttttgttgtttcttctccttgaaaagaaatgttatctccgctgttaaacgaacgcttgatttgaacgatcggctgattgtctttcgtatattcttttgttacttcaagcatcgcaaccgcatcgcagcctttaggaataggagctcctgtcataatacgcacagcctgcatcgcgctgactgtatgttcaaaaacagaacccgctcctatttctcctcgaacagccagttctactggatgaagtgatgatgcttctttcgtatcttgcgaccgaacggcaaaaccatcatatggagaacgatcaaaagcaggaatatcatgatctgctattaaatcttcagctaaaaatctgccgtgagcttcttcaagcgcaatgatttcttgctttctgttttttgcatactgcatcactcgtccaacgcattctccgacagggataggagttcgcttttctctcattcttttcactcctttactcatcctagtaaacgataatataagcttctcgcaaattgaatatcattcgttccatgaataaatacacggccatcttgaaaaattacaaagcgctgctctggaagctgacatgacagaagatatggattgcggtctactttcccctgtttttttaaccgtttttccaattcatcgaagttgtacaaatggcgctgcgagggtctgatttgaaccgtctctctgccgcacagaacttctgttttaagctgattttcatacgctaagtacggatatgtttgggttgatccgcaagaagaacatttatcacttttcattttgcccgtcttaaattcagcatgctgattattccagacgtcaaaggttagaaatgtgtggcgcaaagcttcaacatcttcgactaaaatttttaatgcttcggttatttgataggctgccacaatttgaacagcgggactaataattcctgctgtctcacaggttgctcctccgacaggcacttttttcaatatgcagtgcagacaaggggttacatttgggataacggtataagtggcgccataactccctacacatgagccgtatatccaaggaacttcatacttatgtgacaaatcatttaaaataaaacggatgtcgaagttgtctgtcgcatcgatgatcacatcggctgtttggacgatactttctaaattagcaggctgagcatccatcaccagcgcttcaatcttcacttccgtgtttatttgacgcaaacgattttttgctgctacagctttaggtagtttgttttgcgcatcttgttctgtataaagctgctgacgctgtagattactccattctacataatcacgatctacaagagtcaattttccaattccagcacgcacaagggcttctgcgctagcgctgcctagagcccctgcacctacaactaaaacatgcttacttctaatttgctgctgccctttgtttccaacaggctggaaaagctgctgacgtgaataacgttctgtcactcttttctctccctttctcattcaatctctgacttcactgtctattcctttgtcaaagatatttctttaaaaacatgctattatacacataaagctacgctgctttacggaggcttttttgcataaatatacaaatatattttgatggaggtatttaataaatgtccattgcaggcattgtattagcaggaggaaaatcttctcgctacggtcaacccaaaatgtttgaaacctataagaagaaatcattttacgaatatagtatagatgcattaaaagaaaatcacgtcacacctatacttgtgtctaccaaccaagatttactcccttattttcaaagaaaggatgttgcatttgcagttgaaaaatgcccgtatcaaggtcctttgtatgcaattcatcacgctttaactgcgatcgattgctgcgctgaatggttctttattctttcttgcgatattccttttattaatgctgagtttgttcatcacatgatcacactgacccaaacggactcacctgacattgttcttcctgttcagcctgatcacattcacccgcttctagcactctatcaccgtagaatgcttcctcttattgaacaactcgttacacagggtgaaagaaggcttacgcaattgttgaatcagacaaacgtccttcgcgtgcctttttcagcagaagatcccacttttataaatgtgaatcaccgcagtgattggcatttataaagcttctttgaattatccaccaatatgagacatttccactttttcagcgccttggacctgtcttccattagctcgttcgtctgagtaacgatctttccgatgactccagatatcagaaatggtgtcacaaacagtatgatcagaggcttctgaccgtatcagtgtgcggaggtcatatccttttgacgcgaacaaacaggtatagagctttccttcagccgatactcttgcgcgtgaacaagtggaacagaatgaatctgtgacagatgaaatgataccaatttcctcttctgtcccgacgtatcgatacctggtggctacttctcccgtataatgaggtgtaatttcttcaagaggcatttcttgtccaactatatcaagaatttgtttctttgttataacctcatccattttccagccgtttgaatttccaacatccatatattcaataaaacgcagcgtatgttttttgtctttaaaatagtgggccatcggaagaatatcctgctcattcttgcctttttggacaaccatgtttattttgactgaaatccccgcaagagctgctgcttctattccttctaatactcgttttacgcttcctcggtttccattcaactcttgaaatctcacttcatcaagcgagtctaagctaacggttactcttgataatcccgcttttgataaggcttctgcatgcttctttaacagtgagccgtttgttgttatggcaatatcatctataccctcaatttgcttcagacgattgattagatctggcaaaccttttcttagcagcggctctcctcccgttatacgcactttttttactcctagcgatgcgaataatctagtgagtctctctaattcatcaaacgaaagaatgttttcggcaggtaaaaatggatagtctgccccaaaaatttcttcaggcatacaatatcgacagcgaaagttacagcgatctgttactgacaaacgcaagtctcgtaaaggacgctttaaagtatcaactatagcgtatgacatctgcctcatctctcctctctctagctgtcagcttctccacagcagattaactctctcttaaaattctttccgggcatgtataaatattcaacgaatcatttcgaataaaccctaccgttgtaattcccaattcttctgctagatttaaagcaagttcagtcggggcggattttgaaagaaccacttcacacccgatcttcgctactttcaacaaaatttctgaagaaatacggccgctgaaaacgactactttatctctaattgaaatatggtgttttaagcaatacccgtatagtttatctagagcattatgcctaccaatgtccattctgctaagcataaagccatttttatcacaaatagcagcgttatgaacgccacccgtttcttgaaacgtagcagcagattgctgcagcttattcatcaattgaaaacaatccttaattgaaagttctaccgatatatcgttcatttttttagcagtcagtgcatcatttataaagacaaacccttgtctgctcgccccgcagcaagacgtgatatatcgtttattttgaaggttttgaaaatacgggtttaatttatctattgtaacatgaacatacccttctttttcttgaacccatatgtttttaatgtctgtgtatgctcggataaccccttcagatgctaaatagccaattaccatatcttcaatgtattgtgggctacataccatcgtgacaaactcttcttcattaattttcacagtcacaggaaactccgttacaattttatcttccacgctttccatttgaccatttttaaatctaagaactgtacgcttcttaacggtcgagttcatgtgatgtctccttttttaaataatgtttttatcaaaaacgaatacggaaaccgctatattttcttttattttcatatctgaaaataaattaaccaactttgctcctaccaattcttctaacccttccggcggattcgatgcatatacatcttggatcatttttgttcgagctagatgaaccatgtcacatccttcagcagtgcttgcaataaatgtttctgtcggagttaaatttccatacagtgttgagacagccatattttcaacaaaaaccgtatgtattctttccggtccttttccaaataaatcttttcgaagcttccgaataatatcattaaattcatgaatagtttttgacataatcaacgctctcccaccgattaaaattaaattgtgcattttattcctacagtttttttatcataaatcaacacttcaaaaaataaaagcctaaaatctttgcagcaaaacttttgaagagagttgggtatttaaaaaagttgtgcatttaaaaacgtagcgatataattataaataaccgagatggaataataataatgaattgttattactctatcactttttcttaacgatataaatgggccggattggcatattagtaagacctgctagtaaactattccaccatgattgcacttcccttatttaattaggcgtgtgtattcatggtggttttttgtttttatataaaggaggaaaacaaatgagtcgtgaaattatcactgttcatataaatggcaacgaatacaaagcagcttcaggctctaccatacttgaaattattaatcagcaaagcattgagcaccctcagatttgttatgttcctgaagtggatcctattcaaacttgtgacacatgtatcgttgaaatgaatggcgagttagttcgttcttgttctacaaaagctgaaaacggcatgaagatagaattacaatcagcacccgcaaaagcggcacagacggaagcaatggatcgtttattagagaatcatttgctatactgcaccgtttgcgacaataacaacggaaattgtaaattacataacacagccgaaatgatggagattgaacatcaaaaatacccctatacgccaaaggcctcagagaatgaagtcgatatgtctcatccgttctaccgttatgaccctaatcaatgcatcgcttgtggccaatgcgtagaggtttgtcaaaatcttcaagttaatgaaacactctctatcgactgggaagcaaaacgtccccgcgttctctgggatgacggtgtagcaatcaatgaatcttcttgtgtgagctgcggtcaatgtgtaaccgtatgcccttgtaatgccttgatggaaaaatccatgcttggagaagctggatttatgactgggcttccaaaagacgttttaaatccaatgattgatttagttaaagaagtagaacctggatacagcggaatttttgctgtttcagaagtggaagccgctatgcgcgaaacacgcacgaaaaaaacaaaaactgtctgtacattttgcggagttggatgttcatttgaagtatggacaaaaggccgtgaaatccttaaagttcagcctagctctgatgctcccgcaaatgccatttcaacctgtgtgaaaggaaaattcggctgggattttgtcaactctgaaaaacgtattactaagcctttaatccgaaaaaatggtgcatttgtagagtcgtcatgggaagaagccctcgacttagtagcaagcaggttaagctctattaatcagcagtatggacatggatcagttggttttatttcttcttctaagattacaaacgaagaaaactatgttattcaaaagctggctcgccaaatgtttgaaacaaatgacgtagacaactgctctcgctactgtcagtctcctgcaactgatggattatttcgaacagtgggaatgggaggcgatgccggcacgataaaagacatcgcaaaagctggactggttatcatcgttggagctaaccctgctgaaggtcatcctgtattagcaactcgcatcaaacgcgcgcacaagcttcatgaccaaaaactaatcgtcgcagatttgcgcaaaaacgaaatggctgaacgctctgacattttcatcagtccaaaacaaggtacggaccaagtatggctaatggctgtaacaaaatacatgattgaccaaggatggcacaatgaaaaattcatccaagaaaacgtcaactattttgaagactttcactctttgcttgaaaagtacacgcttgaatatgctgaacaaattacgggtattccagcagcaacgctcattcaaatagctgaaatgattcgagacgccgatggaacctgtgtgctgtggggcatgggcgtaacgcaaaatacgggaggctctgatacatcagcggctatctcaaacctgttgcttgctactggaaactatcgacgccctggagcaggcgcttatccgctccgaggccacaataacgtccaaggagcatgtgatatgggaactcttcctgcttggcttccaggctatcagcacgtcacagactcagtcgcccgagcgaaatttgaaaaagcatacggtgtaaaaattaaagataagccagggcttgataatattcaaatgctgcattcaattggtgaaggaaaaatgaaggccatgtaccttgtcggtgaagatatggctcttgttgattcaaatgctaaccatgtacacgaaatattatcaaatttagatttttttgtcgtccaagacattttcctttcgagaacggctcaatatgctgatgttgtacttcctgctgttccttctcttgaaaaagacggaacatttaccaatacggagcgacgtgtccaaagattgtatcaagcattaccaacgctcggtgattcaaagccggattggtggattgttcaagagattgccaaccgcttaggtgcgaactggacgtatacacatcctggtgatatctttgcagaaatggctagtctatcacctctattcagccaagccagttacgaaaaccttgaaggctggaatagcttcttatgggggagcttagagggaaaaagcacgccgttactttacgtcgatgggtttaatttcccagataaaaaagcgcgctttgctttatcacattgggtacttcctgccgaattcccagaagaatatgatctacacattaataatggaagaatgttagaacattttcatgaagggaatatgaccaataaatcgagcggcatccaatcaaaagtaccggaagtatttgtagaaatttcacctcagcttgccaaggagcgtgaaattgaagaaggttcgcttgtcagattaatctcaccgtttggagcagtaaaagtacaggcattaattacagagcgagtaaaagcaaatgagctgtatcttccaatgcactctgttcataaagattcggctattaacttcttgaccggacctgcagtcgaccaacgaacaaatacgccggcttacaaacaaacaaaagtacggatggaagtattaagtaaaggtggagaaacgcctttaccgtctacaaatccgcgtaacaaaaaacgtcatcctcaaaatggggtcgaggttcagcgtaaatggaaccgtcctggctacgtccatttaacaagtaaataggaggagaaaagatggcacaacctattacagaaattaagaaacctcttctaagcgaggaagaagaaaaacaacaaaaattagaagatttaacttctctgctggcagataatgaagaagcgttgaaccgtattatcggtattgttggcgaacttaacgacatgggtgttcttgaagctgctgattcaatgattcaagcgaaagaaaaaatctcaaaaattgcgcttcatcaaatttccagagaaccggtaaccaatttaattaatactcttatgggtgcaagcagcggtttaatgaaggcagatccagaggtaactgctaaacttgtaaatagcgcaacagctggtatgaacgaagcgaatgaatatgtaaaaaccggaaaaaaagtaagtgcattagctcttataaaagcgctaaacgatccagacgtcaatcgtgcaattggatttgggcttcactttttaaaaggaatgggcaaagcgttggaagaataaatgaagcagcgacttgaaagttttccccctttcaagtcgctgctttctttttaggaagtcaaatttaaaatgaacgtgatatagttatactaaattgctttactacaactaactgaggtgacacgatgcaacaatactttaaacccttattcgcactattatttttaattatgtttactgctgcttgttcgaacgaaacaaataccgatcaatccgcagctcagcacaaaaacatcagcttaacgatatccgctgcggccagcttaaaagatgcgctcactgatattcaaaagcaatatgaaaaaaagcatccaaatatagacttgaaatttaattttggagcttcaggctcgctgcaacagcaagttacaaacggcgcacctgttgatttatttttttcagcagcggaagacaagtttgatgcactagtaaaagcaggagctatctccaaagagaatggtgctgacttggttggcaatgaccttgtgcttatcgtgccaaagaataatacgtctgctatcacaaattttgaagatctatcaaagccgactgttcaaaaaattgcacttggaataccagaatccgttcctgccggacagtatgcgaaggagacttttgaacacatgaacctctggaaaaacattgagccaaaaaccgtctatgcgaaagacgtacgccaggtgctttcctatgtagagacaggaaacgttgaagctggggtggtttataaaaccgatgccttgatttcaaaaaaggtgaagattgtcgctactgcagataatagcactcacaaaccaattgtatatcctgtaggcgttattaaggattcgaaacatccacaagaagcaaaagctttttatcaatttttacaaagtaagacggctcttgacactttaaagaaatacggtttcactgcaaattgaggccgctatgattcaagaatttttatctcctcttcagctatcgcttaaaattgcattagtagcaggatttgtcgttattattttaggcactgttataggaaaactgttatctaggaaacactttaagggaaaagtgatgattgaaacggcgttaatgctcccgttggtgctccctccgtccgttgttggatttttattgattgtcatattcgggaaacacagcctgctcggccgggcaattgaatgggtctttcaacaacccgttattttcacatggtgggcagctgttattgcctccgttgtcgttgcgtttccgcttatgtatcaatctgccaaaacaggctttcaaggcgttgattacgaaattgaagacgcagctcgagtagatggtgcaagcgaatggaaagtctttttctttatttctatccctttagcttctaaagccatcgtaacaggaggagtgctaagtctggcaagagcactcggagagtttggagccactttgatgtttgccggcaatattccaggtgaaactcaaactgtgcctactgctatctacgtagcgattgactctggaaacatgaatctcgcttggctatgggttatttcaatcgtctttctttcctttcttatgctgctttttgttcagcttaaacaaaaataaaaggatgcctctttgtgtaacaggcatccttttatttctttcctgcttttttcaattttacataaattataaattaaaaaggagctaatcaaatgaagagcatacatttgattaactcctgttataagtaaggtaagccaccatacaatatgtattggtggagacggtgggagtcgaacccacgtccagaaatatcgccacttaagcgtctacgagtgtagttggcatattgatcattcgcgagctgttctgcctaccaacaggcgtcccagtcgctagtctgattattctcttccttcgtcctcagacggcgaactccggcgtagcccacttaaagtgagtcccttaccctaccacatgggcgatggagggaggaaccgctaagctactattatgcagctaaagcgaagttattgttagatttgccagttattattggcgttgatgttttaacgaggccatctcctcgactcgcaacctaagctcgaactacccctgtcgaatccgtaacgtccccatataaaagggagtcggaatgtgtaagaaaaaatcttacatcagatagcgacttcagtgtgcaaaatgaaatctaactgataacaatacttattatatcacaaaatgagcattttgcaattgtaatattttgtaatgttacatcttttgacgatcacgaaatgctcgttcgatatcgcgcttcgcttctttttgttttaagtcttcacgcttgtcatatttctttttacccttaccaagccctagtaaaacctttgcgtatccattttttaaatacacttttaaaggaactaatgaataacccgtttcttttgaatagccaattagcttgctgatttcacgcttatgcagcaatagctttcgtgtacgcaacggctcatgattgtatcgatttccttgttcgtaaggactaacgtgcatattgtgtagaaatacttctccgttttgcacacgagcaaaagagtcctttaaatttacacgcccattacgaattgatttaatttccgttccttgtagaacaatacccgtctcatatgtttcttcaataaaaaagtcgtggcgggcttttttgttttgtgcaattaatttcccttcaccttttggcataaaacgttccttcccttcagccgtacttacgtatatgtatgatattatgtatcattttactgtatggaaatctaaacaacaactaaaacgtttaatggagctgttttgaagcagaaggaatacccttctgcttcactgctgtcgatttcgattatttacgctttttctttttgcgcttaacatttggggcaccctcgaagaatctctttttctttttcttctttggcttttgagtagaccactcttcatttttgcttcggctgccctcgcgaacttttcctttatcatctttgcgtgacttttgttttgctttaatcactttaggacggtctttagataagcgtttgcgactttctttcattcctacaataataaagtcaaccgaacgctcgtctttattcacatcggcgactttcacttcaatttcgtctccaattcggaagacattgcccgttttttctccaatcatcgcatagtgacgttcgtcgtaacgataatagtcatctgttaagtcactgacgtgaactaaaccttcaatcgtattttctagctccacgaacattccaaagttagtaacagagctaataataccattaaatacttccccaactttatcagccataaactcagcttttttcatatcgtccgtttcccgctcagcgtcaactgaacgacgttccatattagaagaatgctcagcaacatcaggcagaagctcgcgccatttttcttgcgtttgctgatctgtttttccttcaattaaatacgtgcgaatgagacgatgaacgattaaatccggataacgacggattggagacgtaaaatgcgtatagaactcagctgataaaccaaagtggcctaaactttctgcttcatatttcgcttgtttcatcgaacgaagcataacagttgaaataaccatctcttcaggcgtgccttttacttcttctaaaatatcctgtagcgcacgcggatgaatatcgtttcctgttcctttcaccgtgtaaccaaagtttgtaatgaactctaagaaacgagtaagcttctctgcatctggatcttcatgaatacgataaatgaacggtacgttcatccagtgaaaatgttctgctactgtttcattcgccgctagcataaattcttcgattagcttttcagcaaccgaacgttcacgcaaaataacatcgtgaggatggccatcatcgtctactaatacttttgcttctttgaaatcaaaatcaatggccccgcgatccattctctttttacgaagaatagctgccagcttttccatacgctcaaacatcggaacaattggctcgtagcgttctaacacttcttcatctttatccactaagattttgttaacgtctgaatacgtcattcgttctgtcgttttgatgacactttcaaaaatttcatgtttcactacttcaccctgtggatcgatttccatctcacacgaaagcgtaaaacggttaacttttggatttaatgagcaaattccattagataaacggtgaggaatcatcggaataactcggtctactaaatagacgcttgttccgcgctctgctgcttctacatcaatcggagaaccttctttaacgtagtgacttacatctgcaatatggacgcctaatttgtagtttccattttcaagctctgtaaccgttacggcgtcatccaaatcttttgcatctgctccgtcaatggttacaataacttgatcacgaagatcgcggcggttgccgatatctttttcgtcaatcgtttcaggtgtatcaattgcttgtgttaaagcatcagcaggaaattcttgaggaagaccgtgcttatggataacagaaatgatatcgatccccggatcgtttttatgtccaagaatttgaacaacttttccttctgcgttcatgcggccttccggataggttgtcagttctactactactttatggccttcaaccgcaccgtttcttgctgctttgggaataaaaatatcacctgcaatttttttgtcatccgcaatcacaaagccaaaatttttgctttgcgtatacgtacctacaatttgctgggtacctcgttctaagatttttacaatggttccttcacgacgagcacctgatgattctgatgacactcttgcaagcacaatatctccgtgcatagcattgtttgtttcagtagggggaataaatacatcacccgcatctttttcttcaggaactacgaacgcaaacccttttgcatgtccgcttactttccctttgacaaaattcatttgttccggcagcccgtagcgatcgtttcttgctcggataattaaacccttctcttccataataacaagtgccttcacaaactctttgaatgactctgcatcctcagtattaaattcttttgcaagctcttggacagtcaaaggtttgtaattatcccttttcataaaatccaatatttcatttatatagggctgattttcttctttcacatcatgtccctcctttttctttattcttattatctctatcaccaatcaagtgattccaaaaatgcatatacatcctcgtgaagctgatcacgctctttatcaaaggtaatggtatgaccagattcttcgtaccattttatatcttttgtaggagactcgacgctattataaataatattggcgctgtctgtattaatcatatgatcatgacgaccttgtacaacaaatgtcggtgcataaatcatatcaactgaatttcgcacttcagcgattaattcctgtaaagactttaatgtgttcattggtgtttgcttgaactcttccatttcttgttcaatctgttcagacgatttaccttcacgctttttatattcgcgtgcatacgctaaaacaccttcatacatgacttcttcactctttatatacataggggcgcacataggcacaataccctttataggtacagtgtaacctaatttcagtgaaaatacgccacctagtgaaagacctacagcggcaatactttcatgacctttgcttttcaaaaactcatagccgtccatgacatctttccaccaatcttttggaccagtatgaacaagttcttcaggcgctacgccatgtcctttgtaatgaggtgcgtggcatgtgtatccttttttctctaaaaaacgacctaacatacgaacatcagcagaatttccggtaaaaccatgaagtaataaaacagctttttcgccgccttcaaatgtaaatggctttggttgtgcaattttcatatatcatttaactccttttagttataatatctgcagtcctaatagaaaaaaacatgtatttatgtgacggtcatcacataaaaagagatgtagccatcaacttttacgcttttatactatatttagtacttttttctaaagctatattatatcattacttaaaaatgaaattaaagtattcaacacgcccattaaaaaaccacctaatacataagttggtatacaccaagtacatatgcattaggtggcagtctatccagtaacatattaaagtttgaaataagatacagcaagtgttaacacaaagaataagatagataacactactgtcaaacggtgtaaaactaagtcaattccacgtgctttttgtttcccaaataacgtttcagctccaccggaaatagctccagataatccagtagttttacttgattgtaaaacgaccacaacaatcaaagcaattgaaacaatcactagcaaagtaatcagcaatgtatgcactaagacacacctcctacaccaagtaatagtccatcagcggggtttcttcatcccttctgattggcattaccggggataaagtacgcgcactacgctaaggttaatttatcataaaaaaccctctcgtacaagtaatggcagtgaaatacaacggattttaacgtaaaaaaaacggacgacaatcgtcatccgttttttatactttcaacttatttttttaagttgtagaaagatttagcgccatcgtatacagctagaacacctaactcgtcttcgatgcgtaataattggttgtatttcgcaatacgatctgtacggctcatagaaccagttttgatttgaccagcgtttgttgcaacagcgatatcagcgattgttgcatcttcagtttcaccagaacggtgagaaactactgctgtgtaaccagcacgtttagccatttcgatagcttcgaacgtttcagttaatgtaccaatttggttaactttgataaggatagagttacctacgccttgttctataccttgagcaagttttttcgtgtttgttacgaatagatcgtcaccaacaagctgtacttttccgccaatgcgctcagttaatagcttgtgaccatcccagtcattttcgtctaaaccgtcttcgattgaaacaattgggaattcgttaactaactgctcgtagaaatctaccatttcagcagaagttacgcctgtacggccttcgcctgctaaatcatatttaccagtttctttgttgaagaattcagaagaagctacgtccatacctaattggatgtctttaccagcttcgtaaccagcttttgtgattgcttctacgattacttctaatgcttcacggttagaacctaagttaggagcgaaaccaccttcgtcacctacagctgtgtttaagcctttagcagataaaacagattttaacgcgtggaatacttcagcacccatacggattgcttctttgaatgtaggagctcctacaggtaagatcatgaattcttggaagtcaacgttgttatcagcatgagaaccaccgttgatgatgttcatcattggagttggtaattgcttagcgttgaatccaccaaggtaacggtataatggaagacctacgaaatcagctgctgcgtgagctactgccatagatacaccaagaatagcgttggcacctaatttacctttgttttcagtaccgtctaactcgatcataaggcggtcaataccgatttgatcagttacgtccatacctactaattcaggagcgataatttcgtttacgttttctactgcttttaatacacctttacctaggtagcgagatttgtcaccatcgcgtaattctactgcttcgtattcaccagtagaagcaccacttggtactaaagcgcgtccgaaagcgcctgattcagtatatacttcaacttcaactgttgggttaccgcgagaatctaatacttcgcgtgcataaatgtcaagaattgctggcattttaaaactctcctttataattaattatttaattaatgttttacctgtcatttcttttggctgtgctacatctagaagagtaagcatcgtaggagctagatctcctagaataccatcttcacgaagctctaagccttgtttggttacgattactggaacaggattcgttgtatgagccgtcattggattaccttcaagtgtaatcacttcatcagcattaccatggtctgctgtgatgattgctgtaccgcctttagctaaaattgcatcaacgattttgcctaagcactcatctactgtttcaatcgcttttaccgttggttctagcatacctgaatggcctaccatatcaggatttgcaaagtttaacaaaatagcgtcttgcttatcgccttcgatttctgcaagcaacgcgtccgtcacttcataagcactcatctcaggtttcaagtcatatgttgctacttttggtgaatcgattaagatacgtgtttcaccaggaaactctgcttcacgtccaccgctcataaagaacgttacgtgaggatatttttctgtctcggcaatacgaagctgctttaagttattttgagataatacttcaccaagcgtgttatctaagttatttggcttaaaggctacatatccgtcaactgtttcgctgaagtgagttaaacatacaaaatgtaagcttttcggatgtttttcaccgcgatcaaatgaacggaaatcttcgtttgcgaacgtatttgaaatttgaattgcgcgatctggacggaagttgtagaaaataactgcatcttcgtcttgaattgtcgcaactggcgatccgtcttcttttgtaataacagaaggtaaaacgaattcgtcatagattccattttcatacgaatcttttacgcactcttcagcgcttgtatatgatggaccttcgccgtacaccattgcgcggtatgatttctctacgcgctcccagcgtttatcgcggtccattgagtagtaacgtcctgaaagtgttgcaatttcaccaacgccgtactcttcaattttttcattaagttcttttaaatacgtttcagcagattgaggtgctacgtcacggccatctaagaaaccatgaatgtagactttttctaagccttcactcttagctagacgcaataatgcatatagatgttcaatatgactgtgtacgccgccatcagataaaagaccgaaaagatgaaggtttgtacccttttcttttgcgtgctttacagctgctagaagcgtttcgtttcgttcaaactcgccttcacgaattgctacgtttacacgagttaagctttggtacacaattcggcctgcgccgatgtttaagtgacctacttcagagttacccatttggccttctggtaagcctacagcttctccagacgcctgaagtgtagcatgaggatactcgttccagaaacggtcgaagtttggtttttttgcatgtgttaccgcattacctttatcttcatcgcgtaatgcaaaaccatctaagatgattaatgctactggctttttactcattacttaccagcctccaaaagctgtaagaaagaatctgcttctaagcttgctccacctactaaagctccgtcaatgtctgattgagacatatattctttaatattagcaggttttacgctaccgccgtattgaatacgtacagcatctgcaacatcttgagagaattgttctgcaacaacgctacggatgtatgcacaaacttcgtttgcaccttcagcagttgaagatttacctgtaccgattgcccaaattggctcatatgcaataaccgtttgctttacttgctcatcagttagaccagctaatgctttttgcacttgattagctacaactgtttttgtttgatcttgttcgtactcttcgtttgtttcaccgcagcaaacgattggtgttaaaccgtgtttgaatgcagcaattgttttttggtttactgtttcgtccgtttcagcaaacatttcacgacgctcagagtgtcctaaaatgacatagttcacacctaagtctgctaaagcaacagggctcacttctccagtgaacgcaccgttttcttcaaagtgcatgttttgtgcaccaatttttaagtctgtgcctttagtcgcttctactaaacgatctaaaaatagtgcaggtgcacatactactgaatctacgctttcaggagatggtactgctccttttacttcttcaacaaagctagttgcttcagaaagtactttgttcattttccagtttcctgcaataattggtttacgcatgtataacaccgtcctttgtttattgtgggttttcccttcacgcgttagatgtccaagagggtgctgttaaaagtgattcggtcccttttatctcttggtcatccatcttcgctgcttgataattttttatattatcagtcgtcaggtcggtcctccgtcttactgaaacataaacttacttatcgtttaatgcaactacgcctggaagttctttaccttccataaactctagtgacgcaccgccacctgtagaaatatggctcattttatcagctaagttgaatttttcaacagctgctgcagagtctcctccgccgattactgaatatgtgtcagttgcttctgctaaagcttctgctactgcttttgttccgttagcaaatgcatctaattcaaatacacccattggtccattccaaataactaacttagagtttttgattacgtcagcatagatttcacgcgttttcggtcctgcgtctaagccttcccaatcgcttggaatatcttcaattgatacaacttgaatattagcatcatttgagaagtcatctgctactaccacgtccactggcatgtagaagtttactccgtttttcttagctttttccatgaaagattttgcaagttcaatcttgtcttcttcaagaagtgatttacctacttcatggcctagtgccttaataaatgtgtaagaaagtcctccaccgatgattaagttatctactttatcaagcaagtggtcaattacaccgattttgtctttaacttttgctccaccaacgattgcagtaaatggacgttctgggtttgataatgcttttgaaagcacatcaagctctttttccattaagaaacctgctactgctggaatatgttgtgcaattccttctgttgaagcatgcgcacggtgagctgcaccgaatgcatcgtttacgtacacgtctgctaattcagcaaatgcttttgctaattcaggatcgtttttctcttcacctgggtaaaaacgtacgttttcaagtactaaaacatcgccttcgctcatgccgtcgattgttttctttacttcttcaccaaaagcttcgtcagcttttgcaacgtctttaccaagaagagcttgtaaacgttctgcaacagcatttagacgtaactcttcaacaacttcgccttttggacgtccaagatggctagctaaaattacttttgcaccttgttctactaaatattgaatagtaggaatagctgcacgaatacgagtttcgtctgttacttttccgtctttcattggtacgttaaagtctacgcgacaaaatactcgctttccttttacatcgatgtctttcaacgtttttttgttcatcgttaaaaggcctccttaagtatttatggtactaagcaagtaggcttctatgtaatcatcaatccacaaaccaccgtagatttcattttatatattggcgcctttctatataaagtgaaactccagttagctgcttatgacgctttttcatgtagaagccaatacataaatcaaggaagagggggtatgcccctctcttccttagcaagtcttattatagtcgttctattttcagatatccaataaaaaagaaaagtctagtcgatttctgtcttattgaataaaatagaagcgaattttaagttattcttatagtcctttagcagcgatgtattgagcaaggtctactacacggttagaatatccgctctcgttatcgtaccaagagataactttaaccatgttaccttccattaccattgtagataatgcatcgattgtagaagagttgatgttaccattgtagtcaccagatactagtggctcttcgctgtaaccaaggatgcctttaagatcgccttcagcagcttctttaagagcgttgtttacatcttcaacagttacttctttgtcaagttcagcaactaagtctactaaagaaacgtttggagttggaacacgcatagctccaccgtttaatttaccttttaattcaggtaatactagagatacagctttagcagcaccagttgaagttgggatgatgttttcagcagctgcacgagcacgacggtaatctttgtgtggtaagtctaagatttgttggtcgtttgtgtaagagtgaactgttgtcatcattccgcgtttaagaccgaacttgtcatttaacactttagcaaatggcgctaagcagttagttgtacaagaagcgtttgaaattacgttgtggttagccgcatcgtatttgtcttcgttaacacccattacgattgtgatatcttcgtcagatgctggagcagagatgattacttttttagctcctgcttctaagtgtttcgcagcgtcagcgcgttttgtgaagaatccagtagattcaacaacgatttctacgccttgtttgccccaagataattgagctgggtcacgttcagcagagatttcgattgttttaccgtttactactaagttgctaccatctactactacttctgcatctaattttccgtgtacagaatcatattttaaaaggtgagcaagcatgttagcatctgttaagtcgttgattgctactacttcaacgttatcattttttaaagctgcgcggaatacattacggccgatacgaccaaatccgttaataccaatttttactgccatgggtatttcctccttgaatgtaaaaagtattttttatatgagggattaattaaaaccccttactaactcttttgcggcgccttcatctgtaatgagaatcgaatcatgcgcttgttgcataaacgctttaattgcctttgcttttgatgaacctcctgcaacagcaataacacatttattgttctttaaatcatcgagttgtatgccaactgttttaactttatgaacaacttcgccttgatgattaaaatagtatccaaatgcctcacctacagcatgtccatttttcactttttctaagtctgcttgtggtgttttacggcgttctgccattgtcatagcgtctcctattccgtgaacaaccataccagcggacttaattaaatgaagcatgtctttaatagatggttcaccgataatggatcggtatgcttcatcactaagctgatctggaacatgaagcaagcgatagtgactcatggacttttcagccatcttagcacaaatcgtatttgcttggttttgtacattttcacctagccctccgcgagcaggtacaaaaagtacatcagggtgttttaaatcaggtgtcatcatttcggcaacggcggcaagcgtcgtaccacctgtaacagcaacggtattttttttaccaacaaggcgctccttgatacacgaaacagatgctcgacccatttcatttttgacccaaggagactgatcactatctccagatacaacaacaacttctgataaagaaaacgcctcttttaatgttgtttccaataaccgaagtcctgaaacttccttcattacttcttctaattcagccagaaggagctctccctcatttgtaagcgtcattccactagggtaaatgtcaatcaaatcttgttcttttaagaatgttacttcgcttcgtaacacacgctctgttagcccaaggcttacagctaagtttctgcggccaatcggctgcattaaacgtatgtattgcaagatttgatagcgcttttgcataactgagagaagttcaggtaataattttcgttgtacttctattaaagaacgcatgttaaaatccccttaaggcataaactcgctggacacatttcgtcccgtatagacatattatgtcccaccttgcgcaaaaaaaattcaccctgctacaaaatctattctaacaggagtgaatcctttattcaactcatgtgttgcctatttttaaaagtaagcgttttcttaatggaatacctgttatttttccatattccacttcttctccgtccatttctactacaggaatcgtaagatgatatttttccaaccactcatcgtttttataaatatctcgttcaataagctgaaagggaaaatccgactgcagctctgcaagcagcttctttgcatcatcgcataaatgacagctatttttggtatacagtacgacttccacattcccactcctttactgcgtgacaaaaagttttcgttgactggatggtagaacgtttaattgatctcgatatttggctaccgttcttcttgaaatagtaacgttataattgctttgcaagacgttagctaactgctgatctgaaagcggacgctgtttgttttcttctgatactagctttttaagcagttcttttacatgagttgtagaagtcgcttcgttgttgcccagttgaatactagttgagaaaaaagatttcattgaaaaggtgccaaaaggtgtttgaatatatttgtgccgagtagcacggctaatcgtcgattcatgcacggacgtttgttccgctacttccttcattgttaagggtttcaaatacgaaggaccctttttaaaaaatgcttcttgttcaacaagtaaggtattcattaatgcgtttaatgtatctttgcgtgtgtgtaaacttttcataatccattgaaattcacgatatttctcttgtaaataagaaaacatttcttggttttgcctgtttttcagctggagtttgtattgttcattcactgaaaggcgaggttccaaatcctcatttgcataagcaacgacatttccatcttcaatttttacaataaaatccggtacaatgaatcgttcattggacttcatataaaatgatccaggacgaggatttaattttttaatctgttcatgtaattgttgaagagcttcaagtgagatttgacataactttgagattttcatccattttttatacgcaaattcctcaaagtgatgtgtcaaaatttgctctattttttctgtccattgattattcctttttaattgaagcattaagcactcttgtaaacttcttgcccctactcctgccgggtccatctgctgcacaagctggagagccttttcaacctgctcttgaccttgaccaagctggttagcaagtataattaactcatcgtgcaaatagccagcatcatccagactatgaataacaaactcaacggctgcctgctcacattcatctaattttaataatgcggattgattcattaaatgttcgtacagcgtttctttaggagctggtatactgctcatataatctgttgaatcagaagttgcatgatttttttgattgtgagatgtatagacgggcagctctgaaaaatctataagcggattttgaagcgcctgctcatgtaaaaacgctacaatatccatcgatgaatattgtaaaagagaaatagcttgtgataattcttttgacatcgtcagctttaacgactgctgctgaaataatccaatctccattatttctcccctcccctttatctattttactataaaaacgctttcaaagagcatgtaactattttttatatgtaattttttcatcaaaaaatctccgtcaacctttgttaacgaagcggttcatcctatttttaattactaaccatcaaaaaagtaatagagctatgtacctttataacttttcattataattcgcaccaaccacatgatccgagtaataatccgacatgacgttctcttcgtcatgtcggattttctgcatgtgtataatatatagaagaattacttattgaatggtctgtgccatttgcataaacttgtccaagttttcttcgtcgtttttcgtgaagatggttagcttcattggtttctttcctttaaccaacacagcgtttaccgtatgatcgccagatgtggcttcataccaaacagaatctttgaagattccattcttttcaagattctttttctctgctgcatttttatcaactgctgttgccgtttgtttaacagattgagcagcgtcgtccatcgatgcttttgatgacatcatttcgatacgcataaattgagaatcatctgaagttaatactaacgcatcttttcctggttcttcacccgttagtttataaccgtccattacttgaatagaataatcttgttctgggctttttgttagttttgtttctgaagaagacgttgactgttcatcatccgctgtttcgctagttgatgattgacttcctgaaggtttggctgagacctcagaagaatccgcatcttttttcgaatcttcttttgcagcgcctgatgtttgatcagatttagaagctgtgtcctgctgaacattttctgcttgatcattagacttcggctgagcagaatcttcgttcgtcccgcatgcagacagcaatagtgctaccgatgcactgacaatgaaaagtttgttcatacatttcatatttattcctcctccgtgtttcttttccttatatactgttttatagtattctgacaaattccgcaaccggtacaatggaattaattcttgcttccttacgcgtataagagggtataggaggaaaataaatatatttttttgagaagatgagcctttttactcaaaataaaaaacgttgcgtaatccgcaacgttttaagacgccctcgacaggattcgaacccaccctaagagaaccggaatctcttgtgctatccactacactacgagggcatatttgtcacaacttccattataggagagaaaacttctcttttcaatagaatactacgtttattttttttagaagggggaaaaattttaataatgtcaaagaggaatacatagtcttttaagcgaatatgtgtagtagaggttcttttgtttgacctttattgaccatacgtgtattataggtacataacaaattattcttgttaaggaggaatttaatatgaacttaattcctacagttattgaacaaacaaaccgtggtgaacgtgcttatgacatttattcacgtttattaaaagaccgcattattattttaggtagtgctattgacgataatgtagctaactcaatcgtttctcagcttctattcttagctgctgaagacccagaaaaagatatctcactttatatcaacagtccaggtggctctattacagctggaatggctatctacgatacgatgcaattcattaagccaaaagtttctacaatttgtatcggtatggctgcatcaatgggtgctttcttactggctgctggtgaaaagggcaaacgttttgctcttccaaacagcgaagtaatgattcatcaacctcttggtggtgctcaaggacaagctactgaaatcgaaattgcggcaaaacgtattctattcttacgtgaaaaactaaattcaattttagctgagcgtacaggtcaaccgttagaagtgctacaacgtgatacagatcgtgataatttcatgactgctgaacgcgctttagaatacggtctaattgacaaagtattagaaaacgaccctaaataaaaaaagcctttcccggagcgggaaaggcttttttatgcatcgttctctacgtaagctactaacgcatccattgcttctttttcatctaccccttcaacaatgagcgtaataagagaaccgttattaatcgctaagctcattaaccccatgatacttttagcgttgaccactttctcatctttcttcaagtacacatcagatgtaaaacgagttgcttcttgcacaaatagtgcggcaacacgagcttgtaatcccgtttttaattttacttctacttgtttttccatgataaaatcctcccccttgcaattccccttatgtgactggctgaccggcgcgaagcttgtctgctatttggtcaattttacgcaaccgatggttaatgcccgatttgctaatttgacctccagataccatctcaccaagctcctttaacgtaacgtcttggtattccacacgcaaacgagcaatttctcttagcttttctggtaagatgtctaatccagctgtttcatcaatataacgaatgttttccacttgacgaatagccgctccgatcgttttatttaagttagctgtttcacaattgactaagcgattaacggaatttcgcatatctcggacgattcttacatcctcaaaccgtaaaagagcgttatgggctccaatgatatttagaaactccgtaattttttcagcttctttcaaatagttaatatagccttttttccgttctaatgttttactattcaattgaaattcgttcattaaattgcataaagcttcgttgtgctcttcatacaatgaaaagatttcaagatggtacgatgatgtctctgggttattaatagaaccgccggctaaaaatgcgcctcttaagtaggatcgcttacagcatttcttttgtactagctctggtgaaatacgatgtgtaaacgtgaatccttcttctacaatttttaagtcttccaaaagcattctcgttttctctactaatcgaacaatatacacattatttttcttcaatcgcattttcttacgtacaagcagttctactgacacatcataatttttcttaagcaggacataaatgcgccgagcaatcgctgcgttttctgtttgaacatcaaccgtgaattttttattcgaaaaagaaagtgaaccattcattcgaattaatgcagaaagctctgcttttgcacagcaatctttgacttctaaattcgttaactctttttttgtttctgatgcaaatgacataacttcacctccaatctacatacggaaatggtgttaaacacccgtattcgctttaccttgcagcgatgtcagcatagaatacacaagctttgctactttttttgtatcatgcctaattacgctgccgtcatactgaataatttgatcttcaatcacttctaaccctaattttagcaatacttcacgatcatattctacaggctgagcctgctctacttgatatttcttttttaaaggtgctggaataggtgcattattgacgataattgcatctaaaaatgcacacggcatatgattgtaaagcgctttaatatgatcacttgccttaaagcccaatgtctcacccggctgcgtcatcacgttgcatacgtacactttcttggcttttgtcgaacaaagctcgttacaaatatcctgcaccagtaaattcggcaaaatacttgtataaagacttccgggccccaacacaattaaatcagcgcgtcgaatcgcttttattgtctcgacaagcggtttcacatcggcgggcgataaaaatactttattaatttttttattaacttctggaattttagattcacctgttacgatggatccatcttgcatctccgcatgcagcacaacactttgattagctgctggaagtactttccctctgacgtttagtactttgctcatttctcgtatagcatgcacaaaatcgccagtaatagacgtcatagctgcaagcaacaaattgccaagagaatggcctgtaagctcatttcctgtatcaaatcgatgctgaaaaagctcttcaactagtggctctacatcagataaagcaactagcacatttcgaatatcaccaggagcagggatttcaagttcatcgcgcaatcggccagaacttcccccgtcgtctgctacggttacgatggctgtaagatcaagagggtattccttcaaccctcttaacagcactggtaaacccgttcctcccccaatgacgacaacttttggaagctgttcactgctcatctatgattttcctttctcctctcaatgtcacgatgagaaatatgagttttgtattcattctggaaatggtgacctaaatattcagctaatgtgacggagcgatgctgcccgcctgtgcatcctatagcaatgaccagctggcttttaccttctcgcttgtattgtggaagcataaacgaaagtaagtctactactttttcaatgaacttttgagtttccgtccattttaatacgtaagaagaaacctcttcttcaagccctgttttaggacgcatatggtcaatgtagtgagggtttggcaaaaagcgcacatcaaagactaaatcagcgtcaataggtacaccatatttaaaaccaaacgacatcacattaacagtaaaaacctgtgaagcgtgcgacgaaaactgagttaaaatcttttctctaagctctcttggttttaactctgacgtctcataaataagctgagctcttccctttaactcctcaagaagctcacgttccataccaattccttctaaaggtaaacccgaaggagctagcggatgtgaacgtcttgtttctttatagcgtgtcaccaatacagaatcttttgcatctaaaaataaaatttgtggcgtgacccacgttgtttcactcatgttatctaatgcttcaaacaggctttcaaaaaactctctgcctcgcaagtccataacaagagcaactttattcattttattccctgactctttcatgagttctaaaaatttcggtagcaatgtagggggtaaattatctacacaaaagaaccctaaatcttcaaaactctgaattgctactgtttttcctgcacctgacattccagtaataatcactaattgaatatcgcttacagacccagtactcattttccatccccctcaatctatgcatacatgtctatttatcattaacaaggatcaattcgataagataataactcgaaatccgttgtatacgtaaagttgccataaataacacccgacccttttgctacataatcgataatgtgatgatctcccggcgccatcggcaattcacttacttcactcaaattatgccaaccaagtttgccttcttctgattctagcacatttgtcccatcaaaatctgtagcaaaaaaagtaaacatcatccattcagatgaaatttgatcgttttctttcatcgtaaaagtaaagataccttttacagtgggatttttcaaataaattcccgtctcttcacgaaattctcttacaacagagtcttttacagattctccttgctccattttcccacccggggccacccaccagtttcttcgtggcttttgaagcaacaatactttatcatctttcattaatacacaatttgtgaccctttgcatgttttccacctcatcatatgtatactgacattttcttttattatactacgaaacaaacttctctcacaacggagatgaactaactattactaaattttctgaaaataatcaattgctgttatatacgtaaatccaatctgttatagtcacaaaaaagaggcataggaacacgtcctatgcccgacatacatatattttataaaagggggtcaattactatctatatagtaccccatcaatgtttcacaggtgttacagaacagttaaaaccgaattacgttttgtaaaaggttgatttcagccttattgctgaatagcttttaacttttcttttaactcttctacatagtgctgagccgcttgagccgcaatgctgccatcacctgtagctgttacaatttgacgaagagccttttcacgaacatctccagctgcgaacacacctggtacttttgtttccatttgctcgttcgtttcaatatatccttctttattcgtgatgtttaggctttcgaatggttttgttagtggaaccattccaacataaatgaatacgccgtccgcaccgaactcgcgctcttcacctgttttggtgtctactaacgttacgctgcctactttaccgtctttttcatttacttctttgaccgttgtattccaaataaaatcaactttttcgttgtcaaatgcacgctgctgtaggattttctgcgcgcgaagctcatcacgtcggtgaataattgttacttttgttgcgaagcgtgttaaatatacgccttcttcaactgcagagtctccaccgcctacaacgactagctctttacctttaaaaaatgcgccgtcacatacagcacaataagatacgccgcggccgcctagttctttttctcctggcgcgcctaattttttatattccgcaccagtagcaacgattactgaacgtgttttatattctttgctgcctgcacgaactgtcttgtattcttctccgtcgatgatttctttaatatcaccgtacgcatattccgcaccgaatttttttgcatgctcaaacattttgttagaaaggtcagggccaaggatatggtcataacctggatagttttctacatcttccgtattagccatttgaccgcctggaattccgcgttcaatcattagtgttgataaatctgcacgagatgtatatacagcagcagtcatacctgctggacctgccccaataataatgacatcataaattttttcttctgtcattgctttacactccttttaggaaattccttcgtagttgattccaaatttatggataattatttcgttaccactatcctaatatgttcttcctattatcgtctatttttttgctcaatttaataatgtattcacaattttactgtactttctcactgttgcagcggaaatggaatattgttttgccgcatcggcttgagtaatagcctgccttttttctttcgcccatatatatgtgacggctgcagcccatgcatttacgttcacatgctgaaaatcataggattgtttatatacctgtacatatacataaaaccaaaagcttaaaagatcttgggtatcactttcattctgcgattccatctccagttcaataacatctgccacctcaaaaatcacatgttgtttatcctgccatacatacgtatatacttcatccaaaagtgtactcatatgtatggaagacttgatttcttctaaaaggagcaggcgctgttgttcaggaagcttttttgccatatacaagctgtaaagctgatcgtgaacattttttgttgcacacttctttttcgctgtaacatccactttcgattgaaaaaccttcgcagctttttgactgatgcgccaaggctcctctccttctttatcaggaacgtcttccaatgccagcttccacatttctttagcgaacgcttcacgcccggtatagtaagaagcatatgagagccaataatgaaatgagttgtctccttgaaatccttgtgtataaagcttttttaaccatctgtatgatagtttgtattgaccaatcaatgcaaatgttgctccaagcttatagcggtgttcaaatgacattggataaacgcggctaagcccgtctgtaagctcctcaacttctttatgcttatggcaataataatagaaaatcagctgattgcataacgcatgaaggtttccagggtttttctccaatacttcattcagcaaatccattgcctcatcaattttatttaaataaaaataagctaacgctaaattattatatgcagaccagaattctggatactcatcaattatttcagttaacaaatccactgcttcttcaaaatttgttgcttcaagcagtcgttttgcttgttcttgttttataatcagcatgtcccctagctgatttttaggctcttcatcttcttcatccacatcaattgatagtaaatctaacagatctgtagccgatcgaaagaggtcaccatttggaaaatgctcaatgtaatacatcgcgtatttttttgattcttcaaacagtccaagatgcgcatagctgttggctatatagtagtaacagcttcctaatgtatcgtccatatgatgaatcacatggagaaaaagctcgttggcatcttgataatctccctgctccgttaaagctactccaacgtttgtaagaagctgtggattacgggcattttctttgtttgcacgcgttaaatacttgagcgctttatccgactcctcttcttcaaacgcctgcagcgctttttcgaaatagaagtcacccgtttgcgaaaatggaattacttgtgccattttttgaattacttttgagtgtttttccattaagccctccaaataagttgataatttcgacgttcgtagtatatcacatttgccaagaagtttaatacctctattcaaaaaaggagcctgtaagcagtcgtttcttgacgcaaataagagaaggttttgcctcttttatctaaaatgagacaactccttctctcttttcactatgtagctattagctagagtgacgctcttttaatactgataggacatcgtctaaaggcagcttttgctcacgaagtaaaacaagtacgtggtacaataaatctgcaacttcccacttcagttcatcatggtcacgattttttgctgcaataatcacttcaccagcttcttctcctacttttttgaggattttatctacgcctttatcgaataagtatgttgtataagctccttctggcatttcagcttcacgcttagcgattacttcttctagctcattaataatagcaaaccgattatcgttttgtttattttcgccaagaattgtttcattaaagcagctgtaagcgcccgtatgacaagcaggaccttgaggctccacttttacaacaagagaatcagcatcacagtcatatgccatgctcacaattttttgtgtgtttccagaggttgcccccttgtgccacaactcttgtcgagaacggctgtaaaaccatgtttcacgtgtatcaattgatttttgaagtgattcttcgttcatataagccaatgttaaaacttctttgctcacagcatcttgtacaatagctggcacaagtccatcactgttgaatttaatattttcaatcgtcatcgaatgctcactccttgttgttttgcatagcttttaatttcttttacagatgtttctttatagtgaaagatcgaagccgccaaagccgcgtcagcttcccctttttcaaacgcatcgacaaaatcttgaccatttcctgcgccgccggaagcaataacaggaacgctcaccgcttggctgactgctttggttaatgctaaatcaaaccctgacttttcaccgtctttatccatactcgttaacaagatctcacccgcaccgcgctttactgcttctcttgcccagtcgattacttcccagtccgttgcattgcggcctccgtgtgtgtagactcgccatgattgtaagctttcatcgtacttagcatcgatggctaccacaatacactgagctccaaaaaagtcggacccttctgtaatcagtgttggattgagtacggccgctgtatttaatgacactttgtctgcaccagcacgaagcattcttttcatatcttctaatgcattaattcctccgcccaccgtaaaaggaatcgctagctgagatgctacttcttctacaacatgtaccatcgttttgcgtccttcatgagaagcagaaatgtctaaaaagactaattcgtctgcgccttcttcgtcataaaatttcgccaactctacaggatctcctgcatctcgaagttccacaaactgaactccttttaccacacggccgtcctttacatctaaacaaggaatgattcgttttgtaatcattacgctttcacctcttgaagtgcttcagctactgtaaacttatttgtataaagtgctttccctacaatggcaccaataacgccgtcagcttcatatttctttagtgcatctagatcagcaagtttactaactccccctgatgcaatcacaccttttccagtagccttagccatctcaacaattccttccacattaggaccagacagcataccatcagtagaaatatccgtgaaaataaatgtttccgcaccagcattagccaattcttttcctagttctgtcgctttgattgtagatgtttccacccagccttccgtcgcaacatagccatcacgtgcatcaataccaatagcaatacgcgcaccatattccttcagcatttttttcacaaattcaggattagaaatagctgcacttcctaaaataacacggtcaattccgttttctaagtagtaagcaacgtcagcttctgagcgaatgcctcctccaatttgcacacgtacatctaatttctttttcacgcctagcacaaattcatcattcacgcgcttagccgcttttgcgccgtctaaatcaaccatgtgaatccactgagcgccttcacttgcgaattgtgtggccatatctaccggagaatctccgtacaccgtttcttttgagtaatctccttgaagcaaacggacgcactttcctccgcgcatatcaatggctggatatatttcaaatttgctcatacgatgggctccttttctctacgaagtttgcataattttgcagcatttgcattccgattgcactgcttttttcaggatggaattgagtgccaaatacgtgttcttttccaacaactgctggaacttcgacatcataaggacttgttgctaaaagcacgtcttgatcatttgtttttacgtaataagagtgaacaaagtacacgtgaccttcactgattccatcaagcagagcagattgctgatgaaaatctaaagagttccagcccatatgcggaactttatatgtctgtccttcggcagtaatgccgggaatacgctcgactctcccttttaacagttccagcccttttgttacaccgttctcatcgctttcttcaaataaaagctgcatacctaaacaaattccaagcaaaggcattccttttgctacttcttctttaataaagtccgtcagctttgtttgattcagctgttccatcgcatctttgaatgctccaaccccaggaagaatcagcccttttgccttacttagttctgcaggatctgcggagataatatagtcatagtttaatcgttccagagctttacttacgctgtataagttgcccatcccatagtcgataattccaatcatttacaacatccctttcgtcgaaggcacacctttgacacgcggatcaatcgttgtcgcttcgtccaaagcacgtgctaatgccttaaatactgcttcaataatgtggtgcgtatttttaccgtagtgtacaattacatgtacattcatgcgagattctaatgcgaatttccataaaaattcatacacaagctctgtatcaaatgtaccaacgcgcgacgcgggaatatcacctttaaattcaaaatgaggacgattgcttaaatctactacgacttgagccaacgcgtcatccattggtacaaaagcatttccatagcgtttaattccttttttatcaccgagcgcttctttgaacgtttgaccaaggcaaataccgatatcttccgttgtatggtgatcatcaatctccgtgtccccgtctgcttttacatcaaggttaaactgtccgtgttttgtaaataaatcgagcatatgatttaaaaaaggaacgcctgtatcaatgttcgcttttccttctccatcgattccaatcgctaatgcaatatccgtttcgtttgttgtacgtttaatacttgactctctcattgtgaaactcctttcaactgtgcatgtaataagtaaagaaaagaacatttctactcttttcttttaatctccaccttattttttaaagcgttcttcaaccgcccttgcatgagcttctagcccttctaaacgagcaaatgctgagattttcgagacatttttctggagagcttgttggctgtatgaaatgatactagactttttcacaaatgaatcaactgataaaggacttgagaattttgctgtcccatttgttggaagaacatggtttggtcccgcgaaataatcgccaacaggttctgagctgtatcttcctagaaaaatagcaccggcatgacgaatggaacctaaaagttcaagtggactttcagtcataatttctaaatgctcaggagctaattgattaacagcttcaatcgcttcttctaatgacccggtcacataaatagcgccatggttatcaatagaaggttttgcaatttctttacgaggtaaagattccacttgtctttccacttcttctttaacagcttcggctaatgtcatcgaaggtgtaactaaaatacttgaagctaatttgtcatgttctgcttgagacaataaatcagcggccacttcgttcggcttagccgtatcgtctgctagtacgacaatttcactaggtccagcaattgagtcaatgtctactaagccatatacttctcttttcgctaatgcaacaaagatattacctggccctacaattttatcgacggattgaattgtttctgttccataggcaagtgctcctactgcctgagctccccctactttataaatctctttgaccccaagctcactcgctgctaccactactccagcaggaagcgcgccgtcttttcctggaggtgaaaccatcacgatacgttttacacctgccacttgagcaggaatgacattcatcaaaactgaagaaggataagccgcaaggcctcccggtacataaacacctactgcatctaaaggcgttactttctgccctaaaatggtgccgtcttcttttgttgtcatccaagactgctcgaccattctttcgtggtaatcacgaatgttgtcagcagcttcacgaatgattgacagcatatctgcatcaaccagctcataagcacgcttcttttcttgttctgtcacaagcaaagaagaaagctcaatgccgtcaaattgggctgtatacctttttaaagcttcgtctttttgctcttgcacctgctttaaaatatttacgacaatttctctttgagcacttgtcccttgatcaatcgtacgctttaagctcacttgttctgttacacgtgtaattttcaatgtatgtcacctcttttatacaggttgaaccacttgggctaaacgattcactaaatcatcaattcgttcgtcttttaaacgatagctcacagggttcacaatcaaacgcgatgtaatatcttcaatatgctccaattcaacaagtccgttctcttttagtgtttgtcccgttgatacaatatcaacgatccgatcagccaggccgattaaaggcgctaattcaattgaaccattcaattttataatttctacttgctctccttgctccctgaaataagtagatgctacatttggatatttggttgccactttttgagcaatttctgattttttagcattaggcaaaccggcaacggccaaatgacatttactaatatttaaatccaacagctcataaacatctcgttcttcttctaacattacgtctttacctgcaataccaagatccgctactccgtattctacataagtagtaacgtccattggttttgctaaaataaagcgcatgttctcttcaggaatatctacaatcagcttgcgcgaatcgtcaaattctggcggcaattgaaagtctgcttgacgcaaaagttcagctgcttcttcaaaaatacgtccttttggcattgcaattgttaatagttcactcattattgtccccccttgcctcgttttccaattagaaacgtgacttcttcaaactgtgcagtaaatacatcaacatcatcaacgcctgcaatttcctgagtcactacccggtatccttgcttgcgctgctcagtagctaaagctaacgcctcatccaaacgctcctggctatataatatgccgtatactgctgaaggctcatatacttcttcgcccagcgcttcaattaagcggtcaagctgaattccaaatcctgtagctggtgttttagacgcaaatttttcaagaagctggtcataacgtcctccattaccgatatggaaaccaacgttttcagcaaagacttcaaataaaatacctgtgtaatagctcatatgactgactaagttaaaatcaattttaatttcatccgttacaccgtatgcatcaagcatattccatagctttttcaaatcaccggctgcttttttaccagcttcgttttcaactagttcaaccgcttcttcaatcttcttttcatctccgcgcaggttaagcagctgaagaagacgctgtttatcaatagaagatagattcaaatcttttacatgattacgatagcccacataatttttctcatataaaaagcggcgaagcacgttagcacgttcttcatttccgacaatttctaaaaaaagcgaattaacaaacccgatgtggccaattgccactttaaatgatttaagtcccgctctttttaatgcgccgatcatgagagcaatcacttcagcatcgctgctcatcgtagcgtctccaattagctcaacgcctatttgttcaaactccgccgggcggccaccctcacgctgctgagctcggaatacatttgcttcataagctaagcgcaaaggagaattatttaaaagttttgaagcggccacacgtgcaaatggtgttgttacatccggtcgcagcacaagcgtatgcccttctttatctaaaagtttaaacaattgttgatctaaaatagctgatgcgcttcctaccgtctcgtagtattccacagtaggcgttgccatatattgatagccccagctgccgatttcatctgccagctgattgcgaacttgtttttttctttcaaaaagagctggcagggtatctctcattccaaggggtttttcaaacataaataactttgacattccgacacgtcctttaagcttgattttatctattaaggaaccattgataggttgattttactttatcacactaatgtattagcgaaataacaaattaaagttattgatagtttacacccgataaagtcagccgtcaaccgccagctgttcaaatttacaaaaaaaaccacagcttagttcttgctaagttgtggctttaggttctgcttccctgcgcttttccatttcttcttttgtatagatgacacgcatagggttacctccaacaaagaaaccgggtgctacatctttatgaaccaccgttccagccgctacaaccgctttgttgccgattgttacgcctggaaggatggtgctatttgctccaatcatcacttcatccccaatgatgacatctccaagacgatattccgttatcagatattcatgagcgagaatagttgtattgtatccgataaccgtattgcgtcctacttgtattttttcaggaaacataatatcgagcatcaccataagggcaaaggatgtttgaggtcctactttcatccctaagcacactttgtacagccagcttttcatcgaaagaaaaggtgtatagcgagcgcattgaatgattaggaagttgcgcactactttccaaaaaggcacggtcttatagacatgccaaagggaattagctcctttaaccggatagcgcgtcgtttttctcactgacgttctccttttaatatatcaattaaatccgtcatattctctaaaataatatcaggattataagaagcgatatgatctcttccttttgcactccaagcaactccagctgttttcgtataagctctttggccagaaacgatgtcatgatggttatctcccaccatcagtgcttcttcaggtttagcatccagcagcttcagtgctttttctaccggctcaggatgcggctttgcatttgttacgtcttcaattgcgacaatcgtatcaaagaactgctctaacttcgttaacttaagccccatcatgaccgtatttctttgctttgttgtgacaatacctaatttataattctgctcgtgcagccatttaactgtttcaagtacgccttcaaattctttaacaagcaaatcgtgattggctagattatgcgtgcgatacatctcaatcatttcgtttactttcgttttatccatttctacaaacgtgtcgtataaaggaggtcccataaactgtaaaatatcttcacgagtatattgttcaggataatagtgattaagcgtatgagtaaacgaggcaataattaattcatttgtatcaattaacgtaccgtctaaatcaaacaaaaccgtattaatcgtcattattcatttccttcccttgcgtcaaatcaagtttgtgtaaaccttgtagcttttcttcatttacgccttagattgtgcttcttcattctctaagtatttctgtttactcattcccgtcacgcggcggacaataattaaaataatggctattacaatcagtgcaagtgaaacaacttgagcgattctgagtgtatgcgtcaacattaaactatccgtgcgaagcccttctacaaagaagcgtccaactgagtaccagattaaataagataagaaaatttctccttttcgcagactggtgcggcgaagtaccatcaacaggataaatccggcaaaatcccataatgattcgtataaaaacgtaggatgatagtatgtaccattaatatacatttggttaataataaaatttggaaggtgcaacccttctaaaaaagcacgggtaaccggccccccatgtgcctcttgattcataaagtttccccagcgcccaatggcttggccaaggattaaactaggcgcagcaatatcagccaacttccaaaatgaaatcttttttactttcgaatacacaatggcagttaatacgcctccgattaagccaccatgaatggcaatcccaccttgccaaatctgaggtatttcatttaaatgctttgaatagtatccccattcaaaggatacataataaattcgtgcacaaataatagctattggcacagcaaataagataagatcaacaaatgtatcttttgataagcctcttcttacactttctcttgtcgcaatataaagacctaatagaacacctgcaccgataattacgccgtaccagtagaccgttagagggccaatttcaaggaaaacgcgatctaacggctgaatagttgcttccacaagttaacaccctttcttataaatcttcacggtctccttcttcaattacatctgttagacgtgcagaaaattgttctgctgcgttaatacccatacgctttaagcggaagttcattgctgccacttcaatgataacagctaagtttcgtcccggacgtactggcaatgtaatttttgtaacgtctgtatcaataattttcattttatcttcttctaaaccaaggcgatcataatgtttctgctgatcccatgtctctaactgaataacaagtgaaattcgcttatagcttcgtacagctcctgcgccgaatagcgtcatcacattgatgatccctagtcctcgaatttcaagcaaatgctcgattaaaccaggcgcatttcctacaagcgtgtcttgatcttcttgacggatttccacacagtcatcggctactagacgatgtcccctcttaacaagctctagagctgtttcacttttaccaacgccgctttttcccatgattaatacaccaattccgtatatatcaactaatacgccgtgcatggcagtagtaggtgctagccggctttcaagaaaattcgttaaatggctggaaagtcgcgttgttttaaagcttgaacgcaacacaggaactgattcacgctctgaagcttcgataagttctttcggtacctccatttcgcgcgaaacaatgatagccggcgtgatatctgtacacatcttttccattcgaacttttttttgttcatcatctaattgtttaaaaaatgatagttctgttttacctaacagctggatacgttctgctgggtaatatgtaaaataacctgccatttcaatacctggacgtgaaatatcacttgttgaaataggacggtcgattccttcttctccgctaataagctctaatttaaatttctcaatgatgtcttttgtacgtactttaaccaccgtgcatcctccttttatgaacagtcatatacctgttcatgtctacagtatatccaactctcgcttttatgtcgcgtttggttctagccattttattttatcattaatacggaaagaaaagaaaaaaaagatggcataggctgcatcgccttaccatcttttttagaaaattaaatattgcaagaaagttatcttctattttgaagcggttcaacaatcactcgttgaataagcgcatttaaaagcgacataattactgaggctaaaagtgctgtaccaaacccgtcaatattaaaagaatctcccataacactttgtgtaatcatcagcgtaatggcattaatgacgaataaaaacagcccaagcgtaagaaatgtcaccggcagggtaagtaaaattaaaaccggcttaacaaacacgttcaaaatagatagaatcaagctcgcgataatagctgcactgactgattccaagtggaaagtgtcgatataacctgcaattacgattaatacgagggcattgattaaaatactaatgattccacgcaataacatctttagaaatctccttcttcatttggaactaaaaacacaaaaatcatatataaaatgaccggagtacctactgtaaaaaataaactgatgataaacaatacgcggagtagtgaagcatctattccgatatactgagaaataccgccgataacacccgcaagcttgcgatttgttcgcgaacgatacaactttcgcacgttaatcatctcctttgtttttttactaaaacaagtgttttctattttataacaattgagcccgttttggattcagctaacaatttatagcctttcggcgaagcgacatttgctttgaaacgaagttgtttcatcaccgtttcttttttctcatctactatttccatctcaggaagtgtacacgtaaaattcccaaagttagatttcaaatctccatcaacggagagatgaggcggcgtatagagcgtaatgcttcctgtagtcgttttgaaaaatgctttttcaatgcgctctccttttaaatacgtatcgatatctccgttaaatgtctgaacatcaatcttttttgtatctccatcaaatttaaccgttccattgattgtttcaagctcacatttcgaagcgagtatccgagaaagttccatatgcccgtttgatgtctccatttcaagagaatggctgttcacatcgtaaaagcggatggtaccattagctgttttggctttcaggtctcgtacgcttagtctttccccatcgattgaaccattaaacatacggagcttgacgcgttcatattccatttctggaatataaataatcgctttcactttcatttgcttttgctgaattgcaaagcgcaatttgccattttcgatcgaaaatgccgtatgctgcaagaaagtgcggcgcgcttcatccgaattttctactctgtagatagcagcttcacactctattcgtacttctgtacttccccaaggtcggagttgaacacttccatttgctaaatctacgtcaatctcttgaatatatgcttctgattgttgaaagatgtgctgaacgtcaatcgaaggaccaaagttaaaatctaaatctccttcttttactttttttaccgtttgatctacaaatgtaaataatttttcctttaaagagctttgagatgacttagaagcgtacgtttttttctgttttcctcctacataaggggatagctcagctttatcaggcgtagcataggaagaatcattagctgagtctttttccagtgaatttagcaaagttaaagcctcatctacgctaagtttcccttcttctaccatctgtaaaatttgtttgcgcttttcactcataccttccatctcctctttgcgttttagtcatttaacttttatctgcttaatatttgtatcccttttacaatattccatacaaacacaacaacattaactaaagaaacaacaactaaagctacaattaaaagaataaataccgttccactagagccagtaagagcaggaagcaagaaaaataagaacaagatcgctgtagcgataggtaataaatgtgacaaaaatgcagtttttgcatgtttctttacttctatgttatgaacaacaaaataaataataataggtaataaaaatggtgcaaagaaaacgctaaaataatttaaggaagatagtatgcgatttccttccataataatcagctccttatatcatgtattacggtttaatgagttaaaaagtttcattctttataaaaaagacaccaatgctggtgtcttttaacgagttaatgcctctgctttttcaactttcttctccatacgcttacggtcacgttctaaaattggcttcaaataatgacccgtataggattcttttacttttgccacttcttctggcgtacccatagccacaatttgtccgcctttatctccaccttcaggccctaaatcaagcaggtaatcagcagctttaatgacgtctaaattatgttcgatcactagaactgtatctccattttcaactaaacgctggagcacttttaataatcgtgcaatatcatcgacatgaagaccggtagtcggttcgtctaaaatgtacagcgttcttcctgttgagcggcggtgaagctctgaggctaactttacacgctgtgcctctccaccggataaagtagtagccggctgtccaagcgtgatatagccaagtcctacatcgtaaattgtctgcagcttccgcttaatctttggaatgttttcaaagaagtgaagcgcgtcttcaacggtcatatccaacacatctgaaatgttttgatctttgtatttcacttctaaagtttcacggttatatcgtttgccgtggcagacttcacaagggacgtatacatctggcaagaaatgcatttcaattttgataataccgtctcctcgacaagcttcacagcggccgcctttcacgttaaagctaaaacggccttttttatatccgcgcacttttgcttcgtttgtttgggcaaatacatctcgaatgtcatcgaatacacctgtatacgttgcagggttcgaacgaggcgtacggcctatgggagactgatcaatatcaatgactttatctaagtgttcaatgcctttgatttctttatgttctcctgctttgctttttgctttatgcagcttttgcgccaatgatttatgaaggatatcatttaccaacgtactcttacctgatccggatacacctgtaacagccgtgaacatacctaacggaagctttgcttttacattttttaaattgttttcttttgctcctataatttcaatcattcgatctttatctattgaccgtctttccgctggaagaggaataaacttctctcctgatagatattgacccgttaaagagttttcatcctccatcacttcctgaggcgtaccttgagaaacaacagcacccccgtgtactccggctcctggtccgatatcaattaaataatcagctgccatcatcgtatcttcgtcatgttctacaacaatcaacgtatttccaatatcgcgcatatcttgcatcgtgcgaattaagcgatcattgtcacgctgatgaagaccgatagaaggttcatctaaaatataaagaacccccgtcaagcgagaaccaatttgagtagctaaacggatccgctgtgc

(The sequence listing continues in the following parts.)
